United States Patent Application Publication US 2006/0040262 A1 - sequence listing, part 8

SEQ ID NO: 787 - DNA, 49355 bp, Homo sapiens
  misc_feature (1)...(49355): n = A,T,C or G
tgaggcaggtggatcacctgaggtcaggagtttgagaccagcctggccaacatggtaaaaccccatttctacgaaaaatgcaaaaagtagtcaggcatggtggcgggcacctgtagttccagctgctcaggaggctgaagtgggtgaatcacctgagccagggaggcagaggtggcagtgagccaaggccgcaccactgcactccagcctgggtgacacaacaaggctccgtctcaaaaaaaaaaaaattgtatgcaaatgtttatggcagctttattcataatagccaaaaaatagaaataattcagatgttcatcaactgattaatggataaagaccacatggtggccaggcggggtggatcatgcctgtaatcccagcactttgggaggccgaggcaggtggatcatgaggtcagaaaatcgagaccaccctggctaacatggtgaaaccctgtctctactaaaaatacaaaaaattagcccggcgtggtgatgggcgcctgtagtcccagctactcaggaggctgaggcaggaggatggcgtgaacctgggaggtggagcttgcagtgagctgagatagcaccactgcactccagcctgggcgacagagcaagactctgtcagaaaaaaaaaacaaaaaaaacaaaaaaaaaaaacacatagtatattcatacaatatatgaagtgggtgaatcacctgaaccagggaggcggaggtggcagtgagccaagaccgtaccactgcactccagcctggtaacagagcaagaccacgtctcaaaaaaaaaaaaaaaaaaaaggtaagtatatagagtcaaaaagtagatttatggttgcccaggcatgggggtttgggaagaaataaagagtggctcctaatgtgtatagggtttctttttagggtgatgaaaatgttttaaaactgtccttatgaactcttccaatatgttaagcattattaaattgtaaactctaaatgggtgagttgtatggtcaataaagctattaaatcacaatccaggggctgagattaaaagagaagaaaaaacaatccatataatgtctgtttataattttcattttttcctgtacccccacccccccatcctcctcctttttttgagacaagatctcactcagtcgcccaggctggagtgcagtagctgataatagctcactgcaataagctgaaaattgtaatattagtagaataactataccttttctgtttattagctccttctcctcaacttataaatattttgaggttgaaattgcctttgcaaaattatgacaataagagaaatctgacatagttgagtccatcttgcttcagacctccaagctgtccttggtcatttctgtgcataggcctagctaaccttgggaagaatttagtttataatttaacttgaaagcaaggatgataacagtcccgccctaaaactaacaccctccttgcttagggaccaaaagcagcctttgcaagactttggttttttttttgttttttttttttttgagatagagtcttgctccattgcccaggctggagtgcagtggcacaatctcggctcactgcagcctccacctcctgagttcatgtgattctcctgcctcagcctccttgagtagctgggattacaggtgaatgccaccactcccggctaatttttgtatttgtagtagagatagggtttcaccatattggccagggtggtcttgaactcctgacctcaggtgatccacccacctcagcctcacaaaatgctaggattactgttgtgaagtccacaaaaataggattattggagggacctgagttctgctaaaatgcaggagtagtttctataatctcttactgcccaggaatcatgtggccagagatcacaagatttgtgacttccatagataacatcactattgtggaaactaagattggtttttaaagatttttttcagactgaccccacctggactcatgactcatgactcaactgatcctttggccctataagagctggactcagtgcaggaggcttgttttccacatccctatgatctcatcctcaaccagtcagtagcactcattccctagccccacccaacaaattgtccataaaaacccgaacctctgagccttcagggaaactgatttgagtattagctttagttgagcctcatgggctggctttgtgtcaagtaaaagctctactacaatgccgtccagtaaattggttttgtctgtgcagcaggcaggacaaacccttccgacgattataaggttgcttcaatcttaagagaaaagaaaactacctagttctttctctcattgttctttgattggtgtccttccttcccacctcattaaccaatgcagtctgatttccaccaccagggcccctacctggaactatttcatactgaggttgaaatggccttcagggctgggcgtggtggctcacacctgcaagcccagcactttgggaggctgaggcaggcggatcacctgaagtcaggagcttgagaccagcctgaccaaagtggagaaactctctctctactaaaaatacaaaattagctgggtgtggtggcacatccctgtaatcccagttactcagaggctgaggcaggacaattgtttgaacctgggaggcggaggttgtggtgagccgagattgcatcattgcactacagcctgggcgacaagagcgaaactctgtctcaaaaaaaaaaaaaaatggccttccagccaggcatggtggctcatacctgtaatcccagcactttgggataccaaggtggatggatcacctgaagctgggagttcgtgaccagcctagacaacatggcgaaaccctgtctctactaaaaatacaaaaaaaaatcagctactcaggaggctgaggcatgagaattacttgagcctgggaggcagagactgcagtgagccgagatcaggtctctgcactccagcctgggcaacaaagcggattctgtctcaataaataaataaatgacaaaatccaagggattcagtccccatcttgacctcttgggataattcatcactgttacacccttctggaagttgtttccttactcctataaaccaaaaagtatctgagacagctatcaatcaatttatcttgccaaggttaaggacatccaaaagaaataaaaacagaatcaaagaaatagtcggtggcctgtgcctttctccaaagatgattttgaaggcttcaatatttaaaggggaaatgtgggctgcaggggacagagggagggtacaataatctacacgttgcaaaagaaaaggagcagggaggggaatggtcaattatgtattcatctcacactcagtaaatgggcactttacataagatgaggcctggggtggtggctcatgcctgcaatcccagcactttggaaggccgaggcaggtggatcacctgaggtcaggagttcgagaccagcctgaccaacatggagaaaccccatctctactgaaaatacaaaattacccaggtgtggtgacagtttcctgtaatcccagctactcgggaggctgaggcaggaaaatcacttgaacctaggaggtggaggttgcagtgagccgagatcgtgccactgcactccagcctgggtgacagagcaagactctgtctcaaaaaaaaaataaaataaataaataaataaaaataaggtgaatatacagtagctacctgtggagatatttaaccttttatcagtagctatctgcctaggaacaaaagcaagccagtttcttgcatgacttagctttcagcttaatttttttcttttggcagagtgaactagggtcccaagtttattttcctttcgtactctcaagacaccaatcactccttgttctcctccggccaagtctcaagtctctttccctcctgccaactccttaaaggtacaagtttcataggatttttatccctaaggttttttctatttcacttaaaagacctttttctgggtcaactcattagtcatggcttcaattactgaactcccaacagaattgggctctgaccctgctatgaactttagggcaatggtttattcttctttacttatgtatttgtctgttcgtttgtttgtttggtttgtttgtttatttattagactggttctggcactgtcacccaggctggagtgcaatggcatgattgtagctcactgcagcctggaactcctgggctcaaaggatcttcctgcctcagcctcctgagtagctggggctacaggcacacatcaccacactgggctaattttttttttgagacagggtctcactatgttgcccatgctagtctcaaactccaggcctcaagtaatccttgagcctcatctcccaaagtgctgggattacaggcataagctaccatgccgggcccatagtttcaattgtttacaaagtgactccacctgtatgttccatggacacatcacaattatatgttcacatatcaactcactatcttcccctgagagcagcatctccacttgttatccccatttggttccattatccatcagttaccaaagtcatcactagattccattatctcctgcctcagccccgagattcaatgtcactcaaccctatggtttctgtctcctttgcagttcttaaatccatctcctttccaccatcctgcccccagtttatttatctgggaggtggcatcgagggaggaagagggatgtgcattagaacaacctgtgtaatgttaaccagaaaacatacaagcccagcgtggtggttcacacctgtaatcctagtgctttgggaggcaaaggtgggatgatcgctggaggccaggagtttgagaccagcctgggcaacacagcaagaccccatctctacacaaaattttaaaaatcacttgggcatgatggtgcatgcctgtagtcccagctgcttgggaggctgagacaggagaatcgtttgagcccaggggtttgaggttacagtgaactatcatcgcaccactgcactccagcctagattacaaagtgagacctctcaaaaaattaaataataaacaaacaaccagccgggcacggtggctcacgcctgtaatcccagcactttgggaggctgaggtgggtggatcatgaggtcaggagttcgagaccagcctggccaagatggtgaaaccccgtccctactaaaaatacaaaaaattagctgggtgtggtggcgcacgtctgtagtcccagctacttgggaggctgaggcaggagaatcgcttgaaccggggaggcggaggttgcagtgagccgagatcatgccattgcactccagccagggcaacaagagtgaaactccgtcttcaaaaataaataaataaataaataaacaaacaaccattacataccctaccccatctccagagattctgaacctgtatatactcttcctcatcttcactgtccttacccattttcaacactgctggcagaaagatccaatgatccttcaaaaatgcaaactgtctgtttagcctttcactgggtctctaggatgaaagtccaaactcctctcaaacccgtcaccttgggttcttgcccacagcttccacctcacctgcggccactccctatggacatcccgcactcaacccttatcagattgcagcacttgctgttcctggaacacgccttctttcctcgccttagtgttctcttctctgtggatatcctctgtgatacctttccacttggtagtcactttgttcaaaacgcctctcctgacttctctaggcaattagttatttctgtcagaggtgttggagccagagcaactctatgttgaatagaggctgagacctactgggctgcattgccaggaggttagggattcctagtcacaggatgagataggaggtcagcacaagatatagatcataaagactcagcggatgaaacaggatgtgaaaaagaaaccagccggccgggcgcattggctcagcagacggatcacgaggccaggagttcaagaccagcctggccaacatggagaaacccagtctctactaaaaaaaaatacaaatttagccaggtgtgttggactactacgcgcctgtagtcctaactactcgggaggccaggagttcaagaccagcctggccaacatggagaaacccagtctctactaaaaaaaaatacaaatttagccaggcgcgtaggactactatgcgcctgtaggcctaactactcgggaggctgaggcaggagaattgctggaacccgggaggcggaggttacagtgagccgagaccgtgccattgcactccagcctgggtgacagagcgagactccatctcaaaaaaaaaaagaaaccagccaaaacccacaacaaccaagatggtgatgaaggtgacctctagttgttctcactgtttattgtacgctaattataatgcattaacatgataaaagacactcccaccagtgccgtgacagtttataaatgtcacagcaacatccagaagttaccctatatagtctaaaaggcagagaaatcctcagtcctgggaaatccttgcccctttcctggaaaattcacgaataaccctctccctagttagcatgtaatcaagaaatagccataaaaatagccaacaaggccgggcgcagtggctcacgcctgtaatcccagcactttgggaggcaggtggatcacttgagatcatgagtttgagaccagcctggcctacatggcgaaaccccatctctactaaaaatagaaataaaaaaattacctgggtgaggtggcacgcatctgtaatcccagctactctgtgggctcagcaggagaatcacttgaacctgggaggtggaggttgcagtgagccgagatcgtgccgttgcactccagcctgggtgacagagcgagacttcatctcaattaaaaaaaaaaaaaagaaaaagaaaaagccataagcagccctcagtgctgctctgcctatggagtaaccattcttttatttctttacttctctaataaatttggtttcactttatgagctcgtcctgaattctttcttgtgtaatattcaagaaccctcttttggggtctggattgggacccctttccagtaacatttcctcttctctggtcccacaatactttgtccataagtgattctgtacttattagcagataattacaagtatttttgtttatacaatgtcttaccccctaaactgtcaatagattttgttcaatttatttttgtatgctctaatatagagcctggcacataatgtgtattcaacaaatgtttactgaataaattttcaagggaataagttttaatttctatctttctgattgcttagtgtttaatatattataaaaaatatgattcaggccgagcgtggtggctcatgcctgtaatcccagcactttgggagactgaggcgaggggatcacctgaggtcaggagtttgagaccagcctggacaatatgatgaaaccttgtctctactaaaaaatacaaaaattagccaggcgtggtggtgtgcgcctgtagtcagagctactccagaggctgaggcaggagaatggctggaacccgggaggcggaggttgcagggagccaagatgacgccactgtactccagcctgggcaacagagcgacagactccatctcaaataaataaataaaaaaaaaataaataatatgatgcactttcaggatagcatgctctttgaatctctttaaatagtgacagtttatatttgaacagttattttttcatttttcaaagcacttttccccaacattttattatgaaaatctccaaatatatgggggaaaaataattgtaagtgaacacttgtgtcgggactcagaaactgatagcccaaaatatggggctttgaccggctgaatggaagcctcaaggtctctctgacctcactgcccagcaccatctctcccaaagcacaggatgaagttgaagttcctttatctggctacaatccgaacccaccaaaaggaacaattgttttttcttcccctccttgtaagaccaaaaatgtaaccacctgaacagaccctttcacaagataatgtgcaagttcatccctgtgccctgatccattcactttccctagtcatctcctcaacagaatgcctctgctcccctctccccaagtctgttggccaggatggtagacaagcttctgaaccccgttgggggtgtgtaatcactctgtgattctccccatgtacatgttaataaatgcatatgccttttctcccattaatctgccttttgtgagttgatttttcagcaaacttcagagggcaaagggaacatttttcccatggtccctatacccatatatacccactacctagattcaaaatcaacattttgctatatttgcaaaacacttttcataggctaattttattatcacctttttaaaaaaattctttttacaagtactgctccttgtggagcaggactactcgatagacagtgtgcccagagtagcttattatcattttttatttcacctaatgactaaggtatgattctatgttttatagataaggaaactgaaactgaggctttaatgacttccaaggagcttgtctgccagaagttgtaatcaacttgtgccagctgatctgtccacaccctctatccacaggtgttagatatgtaacctaggtctgaaaaatatttagaatattcttgtgatgaaaagcttgcaattccacaacacaggggaatcagcaaaatcatgggaaaaccaatagaatacatttctaactcatgaatcattcagagaaaaatccagtcttgggttttccctccccctcatcccatttctattcctgattagtcatcatttcctgcccagcctgtctgagatgtttcttccatcctttcttttccagtaacagtaacctggtgcgggtctacagtatctgttatctcagctgatttcctttctgccttttcatgaaccagagacatgtgatttccaattaaagcacagccctgaccatgtctttgctcagcttacaaaacgtcaacggctcgcagctatccaccgaattaagcctactataatccccttccttccacactacaacctatccacgcatctgtcctcttactccttagcttccatcttacatgactaagagttgtttccccaaatacacccttatttacttttttcatttataactcaccaccaccccctccaaagtttcacgtgggtaaattctagacctccacgtcataggccaactcaaatgccaatccttctaatgaaccttctagagagcccgggcctgttgtcatctctatagccaatctttggcatcttgtggcaataatctcattctaccttgtagagctttctggtctgacttcccttgccaccttctgctccctttgcctaagtataacacttttgaggaaaagaacgctgttttaatcatcgtcgcctcgcccacaggcggtgctttattgtgcttaatatcgtttaacgcatcacacactgccgagggggtcggaggcggacgccttttgctgtatccacacagacccgcgcaggcacacacgtaggccgtctgccactctgacagacacgtgtcccctgggccacagccctggaactgtctcgggattcccagcctgtgggcgcttccatgctggccagcggaaggggacgcttttttcttcagaacagctccaacggatacctcttattttagaccgcctgcggattctatctataaatcagcctaagccccgcttccttttaaaacaggattacgccgggtcgagggagcctggcgtggccgcgcagtggccgggtcccgcggattcccctccagctcccgcttggtagcgcccgctttgtcagcgcgcagcgctcgccgggcgccctgcaggtctcgccaggtctcacagcagacggtgccgacgcagcggtgttgcacctccctctccggctctgctgcccgggatttccccagaacctgcgccgcgcgagaaggagcctgggagcatccgcccacactgcccggacagtcggctcgactcggtgctctcggccccagccgggctccgctcctcgggcgcgcgaggggccgtggtggcggcggcgcccggcatgtttcatagtccgcggcggctctgctcggccctgctgcagagggacgcgcccggcctgcgccgcctgcccgccccagggatgcgccgcccgttgtccccgccggctgctgttcccaggcccgcatccccccggctgctggcggcggcctcggcggcctcgggcgccgcgaggtcgtgttcccgaacaggtgagtgcaccccagttccgggcggagaacgccacggccgccaacgcgcggccgccacctggagaccgcgcggaatgaatgagaagcccggggctgccggtcgtggagtctggcctgaaagtgggtcctttaccggagcaaccttctgcgttccctttttcctctttccctgttccccgacttgcctggggcttgcatcaaagctagtaagaactgggagactgtattcaggttcccgcttgacccttagaggccatgctttcagaatttcttgttcttgaccgttaaatttcccccttccgaggccgcgagttactatgttggttacattttttattgcacgacttaacggaaatttttatggaaaaaaaaatctaaatgatgcttatttgcttatatagctnnnnnnnnnnnnnnnnnnnnnnnnnnnnnnnnnnnnnnnnnnnnnnnnnnnnnnnnnnnnnnnnnnnnnnnnnnnnnnnnnnnnnnnnnnnnnnnnnnnnnnnnnnnnnnnnnnnnnnnnnnnnnnnnnnnnnnnnnnnnnnnnnnnnnnnnnnnnnnnnnnnnnnnnnnnnnnnnnnnnnnnnnnnnnnnnnnnnnnnnnnnnnnnnnnnnnnnnnnnnnnnnnnnnnnnnnnnnnnnnnnnnnnnnnnnnnnnnnnnnnnnnnnnnnnnnnnnnnnnnnnnnnnnnnnnnnnnnnnnnnnnnnnnnnnnnnnnnnnnnnnnnnnnnnnnnnnnnnnnnnnnnnnnnnnnnnnnnnnnnnnnnnnnnnnnnnnnnnnnnnnnnnnnnnnnnnnnnnnnnnnnnnnnnnnnnnnnnnnnnnnnnnnnnnnnnnnnnnnnnnnnnnnnnnnnnnnnnnnnnnnnnnnnnnnnnnnnnnnnnnnnnnnnnnnnnnnnnnnnnnnnnnnnnnnnnnnnnnnnnnnnnnnnnnnnnnnnnnnnnnnnnnnnnnnnnnnnnnnnnnnnnnnnnnnnnnnnnnnnnnnnnnnnnnnnnnnnnnnnnnnnnnnnnnnnnnnnnnnnnnnnnnnnnnnnnnnnnnnnnnnnnnnnnnnnnnnnnnnnnnnnnnnnnnnnnnnnnnnnnnnnnnnnnnnnnnnnnnnnnnnnnnnnnnnnnnnnnnnnnnnnnnnnnnnnnnnnnnnnnnnnnnnnnnnnnnnnnnnnnnnnnnnnnnnnnnnnnnnnnnnnnnnnnnnnnnnnnnnnnnnnnnnnnnnnnnnnnnnnnnnnnnnnnnnnnnnnnnnnnnnnnnnnnnnnnnnnnnnnnnnnnnnnnnnnnnnnnnnnnnnnnnnnnnnnnnnnnnnnnnnnnnnnnnnnnnnnnnnnnnnnnnnnnnntatattttaaaatggtcatctggaatgagattgaagccaagactttaaactattcgcattgttggcagatatttaggtatttcccaatctagtatcaaactcctggcctcgagttatcctcagactctggagcagttgagatttgcaggtggaagccaccatgcccaacttagtcattttaaaattaggatgttgaattggttgctggagattctgaactatattgttccttagagtgaacttgacagttagattccccacccccacccccaatttcgtaggaatgtggtacattgtgaaataactgccagaatgagtatattgcctgataacttttttcttgctggaaattttaagaacaacattgttagaggtttgaggtaggaaaagtaaaagaaaaccaggtgatgtcttctgtaccagcttatatcttaaattccctcaaagtctcagaggcagggttagtaggtacctcctcatgggaatactgttagcttgtgtaaaacatagatggctgtgttatctgagtaattactgttatctgagtaataatatcaggtcagattggaatgttgggcttttgacccaagaaagtgtttaatgaacttcttttaagaaatcccctgaaaccccctagttttacagataaggaaattgaaggactttatggtacttaaacttttgtaggcagttactataaagtctagacaattttcctgttcatgcatttttagcttcagcagcttgttggaagaaacatgcctgcattgattcattcattgcttgttcactcattccagatctttacagaatgtctcacacaatgtaggtgctttattatgggagttaaaaacatgagctttagtcagtccctaaggagtttactgcccagtaagagatgagatttgcacaatgaaatggctgtttaatgaaatgaaacaccttttattctcttgacttggaaatggcacaagggtgcaggaaagcaggaagtcccttttgggcttctagaaatgggtggcatttcagctggctcttgaagcatggttaggattggaagagattactataaagcgttttgtttggaaaaagcaggagtaaatgcagaaaggcatgagacacacacagatgaggaagggtgagagaagaggcactttgcaaaaatggacattgttttccaaagagcctcagacccagcactaagtgctttttaattttaattttaatttttattttttttgagacaaggttctctcgcactgttgcccaggatggagtgtagtggcgccacctctgctcactgcaacctccacctcccaggctcaagcagttctcctgtctcagcctcctgagcagctgtgactacaggcacacgccactgtgccgggctaatttttgtatttagtagagacaggatttcaacgtgttgcccgggctcgtctcaaactccccagctctggtgatccacctgctttggccttccaaagtgctgggattacaggtgtgagccactgcgcccagcctatgaagtgcttttttaaaatgcagattcttggatcctactgtagacctattaagtctgagtcattcatgatgggccctggattccacataaccaaatgaaatgacaaaaagaataactccagattgttcttctatgccctcaaatttggacatctggcacccatatgtgagagagacattgaaggggccaaaagctcctctccactcctgagccttgtggtggggagtagtgagtcccgacagctgtccacatttgctaatcagttcctgcataacttatgccccttggcaattggtagttattgggaagataagtacagtccctttggagttatcagattccaggttgttagaattaaaaggtgaccctagggatgatctcggtgtttggctttcttttctcaaggatagcagcccccctaagaagtagcagttgccacagttactgtactggatgaaacgcagttggaagtcatctgtggatttataaatgctatcctccacatccctcctcctcagagaatgaagagctggctgaactactgttctctaccattagaacatttgctttttttcatggtacaatttataggcaaatgccaccagctcatttgagaaggcagctttatttaatatgtcctttaactatgtgagtaaactgcttatgagagagaagaaacgggaaagcttgtcattatcaagctgctatggaataaattgctttccttgtgggaaaactaatgtatgatttttctgttagcattcaatggcaacagtttaaacatggtgaactggggttctttggggttaataaccatggctccagattcacattccacacacttaacatttgtaaatcatttaaccttgcttgctgtctcaacactagactttacctggaacaaatgaataagatcaattgatagcaatttatccacaagctttattgaatagtacatgtaaaaggtgacatgactaattgcagtgggagttgagaagaaagaaatcagtgtggctgaatttgtcaagaaatgctttgcttctaataggtgaaaaaggagggtgttttggaaggggacagtttgcggggtggtgggggcaggcagagaagaccacacacacaatgcctggaagaaggtggcgctcgcatgcaggagctgtggcaagcatcttaggaaaaggggtagaggcagaatcatttgggacagttgttaaaatgcagatttctggcctttcagccctctgcttgatcagtttcctgtggagaagcccggtggagtgcatatttaacaagtgcctcaggggattcttccaaaaagattagggagtatttatgagctctgcccctcctttccccaaaggtacttattcctggaaagcttgagaagctctggagaggattctggaagagccttaagacctttggtctggccgggcacagtggttcacgcctgtaatcccagcactttgggaggccgaggtgcggatcacttgaactgaggcattcaagaccagcctgggcaacatggtgaaaccctgtctctacttacattagaaaaaaaatagccaagtgtggtggtgcacacctgtacatcccagctgcttcggaaactgaggcaggagaatcacttgaacccaggaggcggaggtatcagtgagccgagattgcgccattgcactccagcctgggcgacagtaggagcaatactctgtctcaaaaaaaaaaaaaaaaaaaggatctttgagcttggggcctaaggcagttcaagagacccctgagaaagaacattgacccccgaaaaaagcagctttaaaaaattgtatattttgtcgagacgggttttgccgtgttgcccaggctggtctcgaaatcctgggctcaagcaatcctcccgcctcagccatccaaaagtgctgagattacaggcatgagccatcacgccccgccaaaagcagcttttaagaaagggnnnnnnnnnnnnnnnnnnnnnnnnnnnnnnnnnnnnnnnnnnnnnnnnnnnnnnnnnnnnnnnnnnnnnnnnnnnnnnnnnnnnnnnnnnnnnnnnnnnnnnnnnnnnnnnnnnnnnnnnnnnnnnnnnnnnnnnnnnnnnnnnnnnnnnnnnnnnnnnnnnnnnnnnnnnnnnnnnnnnnnnnnnnnnnnnnnnnnnnnnnnnnnnnnnnnnnnnnnnnnnnnnnnnnnnnnnnnnnnnnnnnnnnnnnnnnnnnnnnnnnnnnnnnnnnnnnnnnnnnnnnnnnnnnnnnnnnnnnnnnnnnnnnnnnnnnnnnnnnnnnnnnnnnnnnnnnnnnnnnnnnnnnnnnnnnnnnnnnnnnnnnnnnnnnnnnnnnnnnnnnnnnnnnnnnnnnnnnnnnnnnnnnnnnnnnnnnnnnnnnnnnnnnnnnnnnnnnnnnnnnnnnnnnnnnnnnnnnnnnnnnnnnnnnnnnnnnnnnnnnnnnnnnnnnnnnnnnnnnnnnnnnnnnnnnnnnnnnnnnnnnnnnnnnnnnnnnnnnnnnnnnnnnnnnnnnnnnnnnnnnnnnnnnnnnnnnnnnnnnnnnnnnnnnnnnnnnnnnnnnnnnnnnnnnnnnnnnnnnnnnnnnnnnnnnnnnnnnnnnnnnnnnnnnnnnnnnnnnnnnnnnnnnnnnnnnnnnnnnnnnnnnnnnnnnnnnnnnnnnnnnnnnnnnnnnnnnnnnnnnnnnnnnnnnnnnnnnnnnnnnnnnnnnnnnnnnnnnnnnnnnnnnnnnnnnnnnnnnnnnnnnnnnnnnnnnnnnnnnnnnnnnnnnnnnnnnnnnnnnnnnnnnnnnnnnnnnnnnnnnnnnnnnnnnnnnnnnnnnnnnnnnnnnnnnnnnnnnnnnnnnnnnnnnnnnnnnnnnnnnnnnnnnnnnnnnnnnnnnnnnnnnnnnnnnnnnnnnnnnnnnnnnnnnnnnnnnnnnnnnnnnnnnnnnnnnnnnnnnnnnnnnnnnnnnnnnnnnnnnnnnnnnnnnnnnnnnnnnnnnnnnnnnnnnnnnnnnnnnnnnnnnnnnnnnnnnnnnnnnnnnnnnnnnnnnnnnnnnnnnnnnnnnnnnnnnnnnnnnnnnnnnnnnnnnnnnnnnnnnnnnnnnnnnnnnnnnnnnnnnnnnnnnnnnnnnnnnnnnnnnnnnnnnnnnnnnnnnnnnnnnnnnnnnnnnnnnnnnnnnnnnnnnnnnnnnnnnnnnnnnnnnnnnnnnnnnnnnnnnnnnnnnnnnnnnnnnnnnnnnnnnnnnnnnnnnnnnnnnnnnnnnnnnnnnnnnnnnnnnnnnnnnnnnnnnnnnnnnnnnnnnnnnnnnnnnnnnnnnnnnnnnnnnnnnnnnnnnnnnnnnnnnnnnnnnnnnnnnnnnnnnnnnnnnnnnnnnnnnnnnnnnnnnnnnnnnnnnnnnnnnnnnnnnnnnnnnnnnnnnnnnnnnnnnnnnnnnnnnnnnnnnnnnnnnnnnnnnnnnnnnnnnnnnnnnnnnnnnnnnnnnnnnnnnnnnnnnnnnnnnnnnnnnnnnnnnnnnnnnnnnnnnnnnnnnnnnnnnnnnnnnnnnnnnnnnnnnnnnnnnnnnnnnnnnnnnnnnnnnnnnnnnnnnnnnnnnnnnnnnnnnnnnnnnnnnnnnnnnnnnnnnnnnnnnnnnnnnnnnnnnnnnnnnnnnnnnnnnnnnnnnnnnnnnnnnnnnnnnnnnnnnnnnnnnnnnnnnnnnnnnnnnnnnnnnnnnnnnnnnnnnnnnnnnnnnnnnnnnnnnnnnnnnnnnnnnnnnnnnnnnnnnnnnnnnnnnnnnnnnnnnnnnnnnnnnnnnnnnnnnnnnnnnnnnnnnnnnnnnnnnnnnnnnnnnnnnnnnnnnnnnnnnnnnnnnnnnnnnnnncttgatgcatcctttctagctgtcttcctttcccttttctatctttcctccaactctgaggttccagtacttaaacagctctgtttgccgatctgcaaatatgcttgtgactgcaaatatcttgtctagtacagggtgcaaagtaagttacactgcagattctaataatacctgggatataatacttttctatttcctcttgtgtgttttgcttttatggatgctaattatcattgaaggtctgctgaaggaaaatgtttatctttcaaatcttgtaggtcaaatagactctctgagacttagttctagaattagtttaatattttatttttttgagatggagtcttgctctgttcctcaagctggagtacgatggcgcgatgtcagctcactgcaacctccgtctcccgggttcaagcgattctcctgcctcagcctcccgagtagctggggattacaggcccctgccaccatgccctgctaattttttgtatttttagtagagacggggttttgccatgttggtcaggctgttctcgaactcctgacctcaggtgatacacccgcctcggcctctcaaagtgctgggattacaggcaccatgcccggccttgcctctgaacttttaaagaccattgtgagtattgattatctgtagaagcttacaagatttccttatctttggtattcaaaagatccatcaggttgaatgtctcagcatctgatgcgcccatccaatctaaagacatgccttagcacattaaaagtttgtatcggttgtctactgtattgtctcttgttctcatgttcttgaactcctgttagattgttggccatatggatctatcctccgtgtctattcatcctttttttttttttttaaattattttagagacagagtctccactttgtcacccaggctggagtgcactggtgtgatcatagctcactgtaacctccaactcctgggctgaagtgatcctcccacttcagcctctgaagtagctgggactataggtgtgctccaccatgcctacctacttttatttttttgtagagacacgggtctcagctcagactggtctcaaactcctgggctcaagcagtccatctgcttctgcctcccaaagtactggattacaagcatgaggcacctagccaggcctccattcatattttagtgtttttatctcttctctgttgcatgagattttctgaaaatttttgttctgcagtcattttaaattcctagacatttctagttgtttaattgctccttttttcatagaaacctgttttgtgtctataatgtctctcgtactttaaatatatcaagatgtgtgtgtgcctgtttctcctttaggcctctttcctggagaggaagggagttttgcatgttgttttatttgtttgtttgttttttgagatggggtctcgctctgtcactcaggctggagtgctgtggcgtgatctcagctcactgcagcctccatcaacctggttcaagcactcctcccacctcagcctcccaagtagctgggaccacaggcatgcaccatcatgcctggcccagtaatacaacagttactgtatttttagtagagacaggttttccccgtgttggccaggctggtcccaaactgctgagctcaagtgatcggcccaccccggcatcccagaatactggcattacaggtgtgagccaccgcgcccagccagttttgcatgttctgagtgggaaggtaatctggagaacgggcagccaggcttccttgttgaatgcgtgagagggagcaggctggtaactaccgcctttgtcaaagaaaggagggtttccttctatattcttcagtccaaccccttccccgctttttaaaaccatccttgagtttcagagttagctcctgatctggtctgcttctctttcaggtccattcacctttgcaagccattctaaggctatcacccattttctttggggtattctttggttctatggagcaaccaaaagccacccttcccggctttgtctgtgagagaggggacacatgtaactagtgccaccgttcactttcattcttgaacgaattgccctaacagttaccccctcagcttctcctgccctttctatttcttgattcagcttggagtttcttcaaggtgctcttgggaaaaccacatttacctttggtaacttgtactgccctttccttctggtttctctgttaattcaaacttgtttctgtcttcttggaattcctccaaatatttgctccattgatgtcatgcatcccttcttgttttccaatgttattgatgcattctttaaaaaattttaaagaggccaggcgcggtggctcacgcctgtaatcccagcactttgggaggccaaggcgggcagattgggagttccagaccaacctggccagcatagtgaaaccctgtctctactaaaaatacaaaaattagccatgcgtggtggcgggtgcctgtaatcccatcagcgactcagaaagctgagggaggagaattgcttgaacctgggaggcagaggtttcagtgagccgagatggcgccattgcactccagactaggcaacagagcgagactccgtctcaaaaaaaaaaaaaaaatttaaatataggcactttatttcttcaagatcttaggaaggagagaaagtaaatgtattttctactttgctgtcttggcctagaaccaacctgcccaatgatatgcaacatattctttttttaatatgtgccttaactattcaagcaatgcactgggaatttgtatatgaaaattgtttcccctcctttttaagtgactaaacatcttttattggttttatgatatatatacaaatagactagtggtgagcatagctgccttccaaatggactatacaattttattttttatttatttttttagatgagtcttgctctgtcacccaggctggagtgcagtggcgcaatctctgctgactgcaacctctgcctcctgggttcaagtgattctcctgccttagcctcccaagtagcagggattacaggcatgcgctaccacgcccagctaattttgtgtttttggtagagacggggtttcaccatgttagtcaggctggtctcgaactcctgacctctggtgatccacccatcccagcctcccaaagtgctgggattacaggcatgagccaccgcccctggccaattcttttagggatgggggtctctttatatagcccaggctgaactcaaacccctgggtttaagggatcttcctgcctcagcctcccgagtagctgagactataggtatgtgtcaccatgtttggctcattatttaaaaatttttcatacttcttttttttttttttgagacagagtttcactcttgtcacccaggttggagtgcagtggcacgatctcggctcactgcaaactccacctgctgggttcaagttattctcctgcctcagcctcccaagtatctgggattacaggtgcccaccgtcacacccaactaatttttgtatttttagtagagatggggtttttgccatgttggccaggctggtcttgaattcctgacctcaggtgatctgctcgcctcagcctcccaaagtgttggaattacaggtgtgagccaccatccctggccttttttttttctttttttttttgagacagggtcttcctctgtcacccagactggagtgcagtggcgcagagccagctcactgcaggctcagcctcctgggctcacgcaatcctcctgccccagcctcccaagtagctgggaccacaggtgcatgccaccatgcctggctaaaggctcattttaatatatctagagcagaggttggcaaactttttccataaagagccagctagtaaatattttaggctttctgggccatatatctgtcgcagctactcaactctgctgttgtagtgtgaaagcagctatagacaatatgtaaactttatttatggacttttttttttgagaccgagtctggctctgtcgcccaggctggagtgcagtggcgcaatcttggctcactgcaagctccgcctcccgggttcactccattctcctgcctcagcctcccgagtagctgggactacaggcgcccaccactaagcccggctaatttttgtatttttagtagagacagcatttcactgtgttagccaggatgatctcgatctcctgacctcgtgatccgcccgcctcggcctcccaaagtgctgggattacaggcttgagccaacgcgcctggcctatttatgaacattaaaatttgaatttcatatcattttcacatgtcatgaaatattactgttcttaaggttccccccctccccctaccatttaaaaatataaaagcctttcttagcttgcaggcagcacaaagacaggatgctgccagagttagctcatgggtcacagtcggtagatccctgatctagagaggactctgtacagtcagcagaaggcgccttatagtttcatatttccactcacactgtaaaaacacgtcatttttccaagtgtcccagaaatgttagtgatgggagatcaccagatttttaggttttgctttttcacatttttatttcagaggattgtgctagaaaagcccagcttgtggaaatgatttgtcagccaatagacaattgagcaccagtcgaacatgttaaactaagcatttatcatggaggggattcccttctctttagagagcttttccatatgagtctgtcctggctgaaggtatggttcagtcttgtctggatgacgcttcagctttcttgtctggtctgtgactgccacctggcaaagagaggttgtttggattgtcacactcagtctaggtgcttgtatttttagacacgttaggttgagagttctgaccttcacttgatatctctggtaatgccaagcgggtcgtggcactgctttgtacactctgtgctgtggcagtgtgtgtgtgctgtgacgacagtgacgtcgacagatggaggaggtgcaactcgacctctgtttctttctggcctgaagaatgggctgctgtgtgcgcctggggctaggcaggacagctgcatcgctgttgccctgaggcagtatcagcacagctggagatgctgacgagcagcagtccaaggtgcaggtaactttctccagggccagcccccttactagttgttcaatctagagaaagctgtgcagatacccacttcaccagatttgggacagaataatgaaaatacatggaagcagtctggcacattatctcgaatgttaataatagccttctctttttgttttgttttgttttgttttgagactgagtcttgctctgtcgcccaggctggagtgcagtggcgtgatctcggctcactgcaacctcctcccaggttcaagcaattctcctgtctcagcctcccgagtagctgagattacaggcacccaccaccacatccagctaatttttgtatttttaatagagacgtggtttcaccatgttggtcaggctggtctcaaactcctgacctcaagtgatccacccaccttggcctcccaaagtgctgggattacaggcgtgagccaccacgcccagctgaataatagccttctctttatgcctaggaaaaaagtgagttttacagaatgaaacagaatagctaacatttagctaatcacttaggatgtgccaagtacctcttgtttaactaaattaatcctcacagtaaccaaataaaatagattacacttacctatatgaagaagataatgaagaagcagagaggtaaataagttattcaggatcctattagtaaacagtggagccaggatttggattcaggcagcctaacttgagtccttgctttaagactttcttgcctctgcggaaccgcaggccgaacttcctggagagagctgaggctttagctatgaggctcagtactcgaggcaggcctgtcatattcagtcagtggcactcaataacagacttggagactggtcggtcactaactaaaatatttgactcctgccagaaagtaataccttcttaacttggcacttagtttatttttatttttattttaaatttaatataagagatggggtctcactacattgcccaggcgggtctcgagttcctgggctcaagcgatccttctgcctaaattggcacttagaatccagtctctaggatctggaaattcatgtcatataagcccacatcatgcaaaatttgaaggtggctgcattcatttgccagatggaccttcaggggacgtgtcacattgtttgagttttgattttctagctgatgggtgcgcacaccacagtttcacaaaaatttagaaagagttactttttttctttttgagacaatcttgctctgtcacccaggctggagtgtagtggtgcaatcttggctcactgcaacctctgccttccaggttcaagcgattctcatgcctcagcctactgagtagctgggattacagggctgccaccacgcccagctaatttttttgtatttttagtagagacagggttgttggccaggctggtctactgacctcaggtgatccacctgccttgccctctcaaagtgctgagactacaggcgtgagccaccgcgcctggcctagagttacgtttaatggtgacttaggacctcattacacttttgaaccttagtgttcttatctataaagtggtgtaaataatggccaacaggttcttgagcaggtaactggttacagcaagtaaaaatgcttggtataccataaaatgctccaccaataaaaggtggtcctccatcagtgtttgacagaatttcttggtactttgctgtcacttgccatcttttattaacattgtttaaagcactgggctggatcctgggggaaatggtaaataagggaaacagtccctgcccttgggaggcttaaagtctcatgagtaaaggacagagattgtggtgcaaatatccaagggtaccctaagtaggaaaaatgggccaggtataagaaaaggagagccattggttgatccatagagctaagcctggttgctatgaatctttattgattccttcaatatatattaaataaatatattgtatatccaacatccaggctgctttatgttggtggttatcttgtgtgaattctcgtttgtattgaagatggccaggtattctggaacctactctaagaaggctaatgaaaatcagctgctaaattagcttagtttttgtgaggtgttcaacacgcatggccagtagatggcagcattggattgctgtttcagagatgccttcttgtgccattgatggcttagtttttgtgtgttgtgtgtgcttctaggtttcctcgggcggaggttgatcagcttccatagcttcccaggtgcgtactcaagataatcctggcttttgcttggtttttaatcagcgtttttgccaggccaccgtttcaagatactaaacgcaaactgtgagagaagtaattagacgctgaatggtttgggcaaagcctagaacaggcaattggtgggcagctagaggaaggaaacctgtgtggagctgtggagagtggtcggccctgagtgactgctttctttttttttttttgagatggagtctcgctctgttgcccaagctggagtgcagtggcgcgatctcagcttacggcaggctctgcctctggggttcacgccattctcctgcctcagcctcctgagtagctgggacaacaggcacccaccaccatgcctggctaattttttgtatttttagtagagacggggtttcaccatgttggccaggatggtctcgatctcctgacctcgtgatccacctgtcttggcctcccaaagtgctgggtttacaggtgtgagccaccacgcccggcctgccctgagtgattccttagtgctattaggagtgcttggaatggtgggccaagtcagtttgggtctcgactgttggggttgtcatccagcattctaattattgatgtgaaggtgtttcattgcagcccgaccattttccttatggtcgcattcttaggaacttgaattgtgatctgcctagattgctttagtagtgtgtagtaattggtagtattaagggtgtacatatattcaaatatatttgtgattagcccagttgtgggttttgttttgttttgttttagagggagtctcactcttgttgcccaggctggagtgcagtggcatgatctcagctcactgcaacctctgccttccaggttcaagagattctcctgcctcagcctcccaagtagctgggagtacaggcgcccgccaccacgcccggctaatttttgtatttttagtagagatagggtttcaccatgttgttcaggctcgtctcgaactcctaacttcaggtgatccacccaccttggcctcccaaagtgctgggattacaggggtgagctaccacgcccagcctcccacttgtggtttttaggaaagtaaaggtattgccaaatgggagtttacatacttgctactgtgtttcagaaatctaaataatctgaattctctggcagttcttcaaaggctgtttataaaagtaagaagagttatattcttatacagtaaaatagcagtgagggcttagcaatagtggtacaaggaattaagacatccagttttaaatgtatgtaaaaatgtgcttatagaattagtcagtggcaggggatggggtgatgttgctaaatggacactaggcagaagagataaagctatttaatgtgcctgttaactatatgaattctgtaacttgtgtgttgcattgagagtgatggctggcccattgccgtgactcatgcccagtcccaacacctagggaggctgaggtagaaagatcactgaaggccaggagtttgaagccagcctgggacgcttagtgagatctcgtctctacttttttaaaaaaaaatttaataaaaaaataaaatgagaattactgtgtttgtgaaaaatgaattgtgagcagaagccaaatatgggtggaatcaaatccaaaatttccaaacacataaaattagacctgaagccaatttgagtgccaaatagagttcagcagaggttttgtcaagatttggtacttttcagtatcttaattgccacatgggtaaattatttgtgctgtttagccttaggaaataagctttgaatattgagctattgtgaaggttcgaaaatctttttaaagtcctgaatagcaactcctattaaggcataaaacttaagtagatggtttgaaatcctggaaatcaacatgtatttatgtatgaaaggaattttttttaatgattgatactcgaaaattaaaaagtgaatgtgaattagccgagggtggcggcgtgcacctgtagtcccagctacttgggaggctgaggcaggggaattgcttgaccctggggggcggaggctgcagtgagccaacatcgcgccactgcactccaggctgaggaacagagcgagactccatctccaaaaaaaaagtaagtgtggccaagtgcagtggctcacacctgtaatcccagtactttgggaggccaaggtgggtggatcacttgaggtcaggagttcaagaccagcctagccaacgtggtaaaaccctgtctttactaaacatataaaaattagacaggtgtggtggtgtgtgacataatcccagctactcaggaggctgaggcaggagaattgcttgaacccgggggggcggaggttgcagtgagctgagagtgtgcctttgcactccagcctgggcaacagagtgagactccatctcaaaaaaaaaaaaagttgaatgttaggtggggtatggtggctaatgcctgtaatcccagcactttgagaggctgagctgagaggattgcttgaagccaggagttcaagactagcctggaaacaaagtgagacccctgtctctacaaaaaaaaaattcttttaattagccagggtggtggcatattcccatcatcccagctgcttaggctgaggcaggaggattgcctgagtccagaagttagaggatgcagtgagctatgatggcaccattgtgctccaactccagcctgggcaatggagtgagaccctgtctccaaaaaaaaaaaagggggaatgtaaagttgttttttaaagtaggtgagaaacaatgagacttgttaactcagttattctctcattttgttttttttttgagagctggggtgcagtggtgcagtcatggttcactgcaacttccacctcccaggcttaggtgatcctcctgccctagccacaggcacatgccaccatgcccagctaattttttctttttttaattacatctagatacggatctctctgtgttgcccaggctactctcaaactcctggatttaaatgatccacccacctcagcctcccaacatgctaggattatagcacgtttgaaattggcataataagcgtatctgcttcctaggattgtgatgagaactgaaaatatagttaaagttcaggaggctgggaagtccagtcaaagggctggcatctggtaagggccttgttgctgtgtcatgccatggccaaagatggaaggtcaagagagggctgaactcgcccttttataaggaacccacccctggaacagcactgtgtctccccaccccccaccttattggtattaatccattgatgagagccatgccctcatgacccaaacacctcccattgcccaactcccaacactgctgctttggggatcaagtttctaatacatgaactttgggggacatgcattcaaaccataataaagtgagaagagaaaggtgcccctcagtcttcagtcttctttagtttacaaatttaaataaatagacttactacattatagtccctaggtggttcttagtaagccttggcactgtgctataagtataaaaataatacgtaaagtctatctagtatttactttgttattaattccctagccctggtttgtttgctgtggtgttgttgtggtggtggtggtgaaagggtcttgctatgtcacccaggctggagtgcagtggcgtgtctcacagttcactgcagcttcaaacacctgggctcaagtgatcctccctcctcagcccctcaagaagctgggactacaggcatgcgccaccacacccagctaatttttgtgtttttatgttcatcatgttgcttaggctgatctcaaactccttggctcaagtgatctgcccacctcagcctcccagagtgctgggattacaggcgtgagccactgtgcccggctcatgttctcctacttctctggccatgtcatttcatgttgtttttgcagatttcccagatctcaatcttttgatctcctttctctctaactcaattcagtcttttctgtgcattaacatctcccaatgtttgtttccagtttgtaactctctcctgaatgtcagtcatctaattgttgaactcctattttctgtaaaccctgtcaagtcttcctaaccactgtagttggcacctccatccttctggtcgctcagctggaaactgtggacattttttttttaaagagatagatagggtcttgctgtcacccaggctggagtgcagtggcatgatcacagctcactgcagcctcaatctcctgggctcaggcaacccagttcagcctcccgaatagctgggactaccagtgcacaccactacacctggttaatttgtttttgttctgttttgttttgttgtagagataggggctcccagtgttgcccaggctggtctcaaactcctgaccctaagcgatcctcctgccttggcctcccaaagtgttttgattacaggcatgagccaccacacccagcctcaaggctcctttttgactgctgtttgtcacaaatcacatccaagttatcaaaacttgttggatccaactttagattgattgagaatccaaccactttcactgctgccccccagttcacccctgctgtctcttgcctagattattgtacatttcctcaaatgagtttcctcctgtctgcccttatgtccctgtagtatagtgtagtttaaatatatcagccagtgatattttcaaaatgtcaatcagattctcctcttgagtagaattctccagctgcttcccatctctgataaaggccaaagtctagatagaccagcaaggccctacccgatctgctccctctcactgctttttctctgacctcatctccttttattcagactgttcacaccaccataatcccctctgtttatcaagcttgccacgcatgttcctcagggattttgcacttgctgttccctctgcttggaatgttttatcagtctccagtgaggctatttccttaccacctcccggtctctgctcaaattccatcttttggcgaggcctccttaagcatcgcatatccaataatagctccctgcccacaagcattccctattctaccttttccgtttatttttctccaaagcacttttccatatatgacagactacacacacacatatatatgtttgtatatagggtcttgtttgtctctccccactagaaagaacagaagctccatgagggcagatactcatctgttttgctcagtgatgtatctccagggtagtgtctggtacacggtaggcactaaaaccttttttttcctagagagatatttaatttttttctctagagagacagagtcttgctattttgcccaggctggcctcaaactcctggcctcaattgagcctcctgcctcagcctcctgagtagctggaattataagtgtgagccactgtgcctggctccaactcaaagatttgacaaaaaatgaatgaacagtcgtatgtgtctgtggtttgaatggggcagaagatgagagtggctacccatgatggaccaagtggtatagtcacaaattagagcttcatatctaaatcctattttttcgaagtccttttctggttactcttatccatcctgattgttttaacccttattataccctagtgattctgcatagttagcacccagtttttctctcatgaattcatgagtattaatctttccccaaatacttgccaatttttttaggggaaatatcagcacatattttattggcataactcaataaaactacattggcataactcagtgacttaacaaaactcagagaatagagaaataaatgtaaaattaacatacagcagagagattatcccaaggactatgggattggattaaattaagaagattagagtgttgccagtgatggtcccactgtttaagagagtaaagtgcaaagaaggtgagtaaaattgcagggagcacagaacagcctggcacaggggagtccatcagtaagctgtctagaacgagggtggataagtggaaatgcctttcaggaccatctgtatctctgtcctaacttcatgctcattatgcaacagactaatgtttcccaggtactttagtattagagggcttgtcctatgtcatgttgtggttaaatactctggcagtcagtgttgcaccagtccaccttggggaatatctttgggtttcctgtaaggtctaagggggcagagacaagactatagtaaacacttcctaatgattcccctctacctagtctcttattcaaaatgtagcccaatgatatctttctcagacgtgctcatctacagtgaaacaagtacaaaagggctatgccaataaaacttgaaaggcaaattgcagtgtattattccatacatgagtagtgttatcacacctgacaagaattattcattgtttttcaaatatgagtatagaaattctgaatgaaacatccttttttaataattactatttttttatttttgtagagacagggtctcactatgttgcccaggctggtctcgaactcctggactccagggaacctcctgcctcagcctccgaaaatgctaggattacaggtgtgagccaccacgcctggcccaagttttattaataggaagatatgtgtctctactgcaaacagtagagctgttatatgaggaacatagatttgaaaagtttcccccgttctaacccagatgccttttccacctgatcttggagaaattaagaccacgtaagccctcattttaaagagaagtaagcagatcttggctggtacggtggtgtgcaccggtagtctcagctactcaggaggctgaggtgggaggatggcttgatcccaggagtttgaggctacagtgggttatgatcataccactgcactccagcctggtaacagagtgaggcccttacaaaaaacaggccctttggggaaaaaaaaaaaaaaggctggatgtggtggctcacgcctataattcccagcactttgggaggccaaggtgggtggatcacttgaggtcaggtgtttgtgaccagcctggccaacatggtgaaactgtctgtactaaaaatacaaaaattagccaggcgtggtagaacaaacctgtagtcccaactcctcgggaggctgaggaaggagagtcgcttgagcctgggaggtggaggttgcagtgagccgagatcacgccactgcattccagcctggtgacagagtgagactgtctcaaataaataaataaataaataaataaattttaaaaagttaggtaagcaggtctagagagttgtggcacagctaaatagtcatagaactgggactagaattctcttttgaggccttagaatttggtcacgctgcagtatatcctgcatctcaaaagctttgtcttctgagggtgaatttgttgaaaaccaccaagaggatctcaggccaaataaggtagatgaccagatttgataatctgctattagtccaaaatgaactggctttaacaagaatgttttccttgagaattgtagtgaatgaatagcctattaaatgcatcgcaaaaactagatccccctaaaagacaacagggaatgatagactatcccatttgattcatctcatatatacacagcagtctcagagttgcagtgccagtaccaccactactaattatgatcacttagacataattactaattatgattgctactatgaaacttatgaaaaaagtttaaaatttttaaattgaagatgcttttctcatcctgccccctccttttttggtgtactacatcttcatgttcactgttgggccatatagccattacatattgaattctccctgaaagtcttctttagaattgatttgctaagtagctctgtgtttagtgctttgctccagttcttacaccagtgtttctggttgttttggtctgaagcttgttctctagttctagatatggcaaatttttttttgaagaaggctacatattaaatatttaggctctgtgggccaaaaatggtcctgttaatgtattcgtgagtgtgtgtgtacttaacaacacattttttaaatgtaaaagccattcttagcttgttgggtgtggtggctcatgcctgtaatcccagcactgagatggctgagatgggaggattgcttgagctcaggagtttgagaccagcctgggcaacacagtgaagactccatttcaaaaaaaaaaaaaaaaaaaaaaaagccattcttagcttgaggactgccaatccttgctttagtagattcctcataaggggctcatggagacaatattccagttttgctggatataaaatccttggcttacactttatgtattttaaatatgttacttcattttcttctcacataaaacattgcagttgaagtctgatgacaatctgattttttttttactagaccacttggtgttggtcattctgggttgatactctcaagtttgcaatgtctttttttcaatatctactttttaagtatttttttttaagttttcttgatttcttttgttccctttcgttggtcttcatctataagaactgctattactcatattttgggtctttgctcatttttagtatttgtcactttctcccttttatttttttttaaaaaaagcaatccttaggtttgactctgatctttttctcatttctttttaatttttattgctaattctttttggtgtctaatttctgaattttctaattctgatttaggttattctttcatgtcttgtatctttttgttttgttttgttttgagatggagtatcgctctattgccaggctggagtggaatggcgccatctcggcttcctgcaacctcctcctcccgagttcaagcgattctcctgcctcaccctcgcgagtagctgggattacaggcgcccaacaccatgcctggctaatttttgcctttttagtagagacggggctttgctacgtaggccaggctgatgttgaactcctgacctcaggtgatccgcccgcctcagcctcccaaagtgctgggattacaggcatgagccaccgcgtccggcctcttgtatcattttcttttttttttttttttgagacggagtctcggtctgtcgcccaggctggagtgcagtggcgcgatctcggctcactgcaagctccgcctcccgggagcctcctgcctcagcctccgaagcagctgggactacaggcgcccgccaccatgcccagctaattttttttttttttgtattttttagtagagacggggtttcactgtgttagccaagatggtctcgatcttctgacctcatgatgcgcccgcctcggcctcccaaagtgctgggattacaggcttgagacaccgcgcccagccttgtatcattttcttaaagacttagctcactctgcaataggatgcagtttgatttgcttcctgggcacatttctggcatgctttcactgtctgatattgttctattctttattctcttcatgtgaaattgatttttctaaatttttagaaggaagtgtggttcaggattgcttttctgatttcacgtactcctcaaacgtttgactcccattggacatccttccttctgcacattcatttttgcatggtagttttttcatataaccaccctaaaactcagcttggcaaagataaaatgtcatcaaaaggaatgtagggcagtcctattgaaactgagctctacatcaagcccagagcctgacaggtgtcaaacgtcactgtttatttcacatttaaaatataaaatataccatggtgtccctgtgagtttgctgtggttccctgggacacgttagctcacaatttggggatcacaatcccaggtgatgctgatattgctgatcaggagaccacacttggatgtttggctgttttttgtttgttttccccaaaaaacctacaggaagtaaaaaaaaaaagtacaagaagaaagactttcaaaacttgtactgccagccatgaagaaaatttcttcctttggacccatgtactcatgtatttatcaattaaaatgaaattattgaaatcagtttggaaacagttgtatatgtgtgtatttgtgggagagcatgcttgcttgcagatgcacacacacctgctatgtttgttgggaaaattagtatgtgttcatttgctgtagtctagctttcttactggagggaaaaactactttgagtagacaggaaggaacaaaaaaagcatgcttgcatcctcattgaccttaatgttcaaggacatttggtggtaaataattgaatttcctttgtaacctgccacagtgaatttgattgactgctagtttgagatgtgattgataagcctgccaaattttataaagaaaactttatataatgtttacatttataaaatgtttatgttttataaagaaaactttgtatctctcaagagagggaaatccagattgcctggtaccagcatttatcatacagagaatcttggatgttactcccagtaaaatgtgcccctaatttatactataatgaaaataaaacatagttgacctctaaaagagcaatcaactgctttcaagtgaactgccacataatgctaattagttgaagattatgctctgttctccttaatgaattataaaaagcaaaacactaaaaattaactcgggaagacaaagtaactggtgcttcctgcatttttccttgttctttgtctttctaggatcccaggaaatgtgggcaactcatgagaaggtagtgccctggatggaagttagctgaacaaaatcagcttactctaagcccttctggcctcagccccttttctggattttaagaaatccagcaattgatacaagattatagagtataccactcagtgaagttcagagttctactacagaaagcccaagccttgatttacacttaacatctaggagaaatgggaaagaatctagccaatttactttccccaacagagggatctgtatagatgagatgaccagcgtagcaagcagcctgctattacctaatctctcacccaggattaacattaacatgggctttctaacatttcactttttacaaactagtctttaagatcttttttttttttttttttttttgagtctcgctgtgtcacccaggctggagctcaatagagtcacctcagctcactgcaaccaccatctccctggttcaagcaattcgcctgcctcagcctcctgagtagctgggattacaggcgcacaccaccacacccggctaattttttatgtttttggtagaggcagggtttctccatgttggccaggctggtctcgaactcctgacctcaagtgatccacctgcctcagcctcccaaagtactgggattacaggtgtgagccaccatgcccagcctagtcttgaggttcttaagatatatagaaaaaggaatgtagattttgttaagccttgctctttttttaagactggttttataaattacaaagacaaatcctaggttagaagaggccatcaagatcaaagtatttcttccttaaaaggatgagttttcattgttaatcagaggctagttttaacggtagtacttaaattaactgtcctagtagaaagctggaacctggaaactcctttattctgcctctgtagaaatggctttatacgccgggcgtggtggctcatgcttgtaatcccagcactttgggaggccgaggcgggcagatcacctgaggtcgggagttccagactagcctgaccaacatggggaaaccccatctctactgaaaatacaaaattagcagcgggtagaggtgcatgcctgtaatcccagctacttgggaggctgaggcaggagaattgcttgaacctgggggtggaggttgcggtgagccgagattgtgccattgcactccagcctgggcaacaagagtgaaactccatctcaaaaaaaaaaaaaaagaaaaaagaaatggctttatacactattatggcaacaattgagctcctggtttcggtggacagtaaatgtttatcttacagttgtgctgggcgagaagtcaggaaaaggagctgagtgtgtaactgtgatttccttttccgtagtgtgttccatgggaaccggtacaagcagactctatagtgctctcgccaagacactgaacagcagcgctgcctcccagcacccagagtatttggtgtcacctgacccagagcatctggagcccattgatcctaaagagcttcttgaggaatgcagggccgtcctgcacacccgacctccccggttccagagggattttgtggatctgaggacagattgccctagtacccacccacctatcagggttatgcaatggaacatcctcgcccaaggtatgctggatgcttttgtgcctctgcagtcaagtttgctgtgactgcctttctgcttctgcacatccacagtgcactgttttatgtggaaggaagaggtgtgggcagatggaggtgactgcagcagcatggagagctcctagaagaggttaagacagggaatcatctggttttcactttttttttttttttagaaagaaaaaagacactttaattgttcttggatagtctacaaacatggaaggtgtaaagaataaaccacgagttacttgctttaattgtaaaaaccaagtcaggtgcagtggctcacacctgtaatcccagcactttgggaggccgaggtgggtggatcacctgtggtcaggagttcgagaccagcctgaccaacatggagaaaccccgtttctactaaaaatacaaaattagccgggtgtggtggcgcatgcctgtaatcccagctactcgggaggctgaggcaggagaatcgcttgaacccagaaagtggtggttgcagtgagctgagattgcgccattgcactgcagcctgggcaacaagatcgaggttgcagtgagctgagattgagccactgcactccagcctgggcaacagagtgagacactgtctcaaaaaaatatgtatatatatatatatatatatatatacactttgttacagtagtaaggacttctttcctgggtctgccaaattaaaaaacagatgtgtcaatcaactctatgtagcattgccttttatgtaagcagttgagattttaagaaaaacaagggcctgattttttttttttcctggaaaataaggggagattccgtgacttaccaatctttgattctttttccctaagtaggaaaagctgcctatttaaaataagttccattcattctgagtagtgtccataatagtcagggttaaaactaatacttggtgttaaatatttggtgtttaaaaaaaccaaaaaaattttaaaagaaaattggcatttatttcattttatatagcttagatccctggcactgcaaagcagtttccttaagtaagatcttaatatcctggaatatagttaacatgaaatcatttcgaaacaaaagatctgttgtttgcttcatccacatagtgagaggtgatttagtttggatggggtaatacagtttggacagagagccactccaagcatttaaagcagaggaagcattctgagggtcttgagtgatgctaaacctcctgggtactttgaagtcacggttttgtaagagctgacaactgactagctttttcttttcagctcttggagaaggcaaagacaactttgtacagtgccctgttgaagcactcaaatgggaagaaaggaaatgtctcatcctggaagaaatcctggcctaccagcctgatatattgtgcctccaagaggtggaccactattttgacaccttccagccactcctcagtagactaggctatcaaggcacgtttttccccaaaccctggtcaccttgtctagatgtagaacacaacaatggaccagatggttgtgccttattttttcttcaaaaccgattcaagctagtcaacagtgccaatattaggctgacagccatgacattgaaaaccaaccaggtggccattgcacagaccctggagtgcaaggagtcaggccgacagttctgcatcgctgttacccatctaaaagcacgcactggctgggagcggtttcgatcagctcaaggctgtgacctccttcagaacctgcaaaacatcacccaaggagccaagattccccttattgtgtgtggggacttcaatgcagagccaacagaagaggtctacaaacactttgcttcctccagcctcaacctgaacagcgcctacaagctgctgagtgctgatgggcagtcagaacccccatacactacctggaagatccggacctcaggggagtgcaggcacaccctggattacatctggtattctaaacatgctctaaatgtaaggtcagctctcgatctgctcactgaagaacagattggacccaacaggttaccttccttcaattatccttcagaccacctgtctctagtgtgtgacttcagctttactgaggaatctgatggactttcataaatacttgcttttgtctttttaatcacaggagtctatttttttttttttttttttttttttttgagacagagtctcgctctgttgcctaggctggagtacagtggcctgatctcggctcactgcaagatccgcctcccgggttcatggcattctcctgcctcagcctccagagcaactgggacaacaggcgcccgtcaccacgcccagctaattttttgtatttttagtagagacggggtttcaccgtgttagccaggatggtctcgatctcctgaccttgaatcacaagagtcttaacagggaatgtttcaggaaacaaataggataagacaatgccagaggaaggatagaaacatgggaagtttctatcatttcattttctgcgtttccagcatgcccttggaaaagactccctttagtccctttttcaattaaaacctatggtgaaaaaggcgtttgcactccaattttggcttgtgttgttttcttttccttaatattacattttgatcatttaagggcattaaattggcttgttttggtcaggtgtggtggctgctcatgcctgtaataccaacacattgggaggccaaggtgggagaatcacttgaacccaggagttcgagtccagcctgggcaacatggcacgagaccccatctctatttctaaaataataataaattcggttattttgaagctttttcaatttgaggatgctataaaaacttagacttgttgcttgaatcttccataatagtatgtaggagcaatttctctaaacagcattttaagttatttatttgtgggtttttaaaatgtcaacaaaatgcatggcagtatttattttttatatcttcatataaaattaagtaaattatagcattatgaacattttagaaccatgcaagagaagttatagagaaagtaatttatggtgattttcataaagctttaaaatattttcatttgggctataacaaaatgagtacaaaggaactatttagcctggaggggcttttgttatttaaatgtcagatttctttgatacattcttcaaaaataatccttgtcctgcctctatgttccattattgtgtttcttttttttttttttggagacagagtctcactctgttgcccaggctggagtgcagtggtgtagtctcggctcactgcaagctctgcctcccaggttcacaccattctcctgcctcagcctcccaagtagctgggactacaggcgcctgccaccacgcccggctaattttttgtatttttagtagagacggggtttcaccatgttagtcaggatggtctcagtctcgatctcctgacctggtgatctgcccgccttggcctcccaaagtgctgggattacaggcgtgagccacagcgcccggccttattgtgtttcttgaagagattccaattagttttcaattatttaaccaattagttttcattattgctgttatatttaaactttaccattggaataatattggtatgcgtttgatattagtcactcgatgtcatcattatttgtattggaatgtgctattcacaataggttatttagaagctgtatgtggcagtggccaagagagtcagtaggaccttcttttcagagataggaaactttctagaaagcctgttaatgggctttcattgaaatttcctaagatagccagatactgtcattcaaaatatctagaaagaagaatgtaaaaagttagataacgtgggtcgggtgtggtggctcatgcttgtaatcccagcactttcggaggccaaggtgggcggatcaactgtggtcaggagttcgaaaccagcctggccaacatggtgaaacctcgtctctactaaaaatacaaaaattagctgggcatggtggcaggtgtctgtaatcccagctacttgggaggctgaaacaggagaatcgcttgaacctgggaggtagaggttgcagtgaacccagactgcaccattgcgctctagcctgggcaacaagagtgaaactccatctcaaaaaaacctggaattctcttccatcagaaataaaagtaaaaattacaggtaaagcctcttccaaacaaaataacttattggtaatagatattttaatttgtgagttgtaaatacataagattaataaatggtcttttaaacctagtgcttttaatgtctttgtagtccaaaaagaatctgggagtagattttctcctttaatactgttttatcataatgacccacatatatccattcacacatggagccttcactgtaaaagtgaacgtacatagatctgtagctgcaacaacgtccactgaaatggatcactcattctttaatagaaccacttttaaaacaaatgaggttttcagaagtaacatagtatgcacagaattttggggctactggaaagaatgacaagcacgggaacatctaccaaatgtagaattggttcagattttagcatgactaattgctagtcatatgttgttgagaacaatactgattagaatactcattattgcaggtacattgtttacctaccccaaaatacttcaaccggaagagaaaccatggcagccttaaataaataaatctggataagaatgaaggccaaaataatgtctgagtttcaagtgttgtctaccaacaaaattaacagggtatgagttgagggtgggcatatgggtgcatgggcatgccaccagacgaaatcagttttggaaacaccaacatatgattggtatgttactatgagttaaggggactggaaaaaatccagtgaaactctcgagttatcctttctagttatcactgcaggagattggatccttcactgatgcattatcaggaactgaaaaagaaaatttttttaaagtcatatgtgagccttctaataattttttagtagtatataaatcttaataggttgcttttttcttttcttttgagatacggtattgctctgtcacccaggctgcagtgcagtggtgtgatcatggctcactgtagtctaccccacgggctccagtgatcctcccacctcagtctcccgagctgctgggaccacaggcacgtgaaaccatgcccagctaaaattttttacttttttgtagagatggggtttcatcacattgcccaggctggtcccaaactcctgggttcaagtgatcctcctacctccacctcccaaagtgctgggattacagccatgagccactgtgccccaccctaagttgcatgttccttgcatagatcccttattccatccatatgtacctttcattctgcttttcctattataccctatatactattgtttctggtttttatttttctattttcccatacactgttttgtcagagtctcagaaggtaaattgcaaatttgaagagggagtaggaatggcatgagttttggtttccttcatgccacatttcagtagataccgtagtacatggtggtagtaacgactgactggattgtttatttaaataaggcattatggtgtatacatatgatgaaattaacatttgagttcctttgactccaagagctttacatacgatcttaaaactaaactatagacgggggctcaaaaggtcaaataatttgagcaaagtgatagcaaataaatagtagctgagtcaggattcaaactcaggtctgtctggattccaaagtgcttgcttcttccccaccaccatttctttggctttgagtgaacacaaacggggagaatagacattgcagtgtagcaagagatttgttaaacatggtcaaatggtcaaacatgtaagtcaaatacacatgaactatcatacatacagtgttagactagaagcaggatatggtggctgaatactggaatataatggatttccagtgggttttttttttttttttttttttttaagatggagtctcactctgttgcctgggctggagtgcagaggtgcgatctcagctcactgcgacctccgcctcccaggttcaagtgattctcctgcctcagcctccctagtagctggaattacaggcgtgagccaccacacccggcctggatttccagttttctgatacagtaaagtctagttttgcccaaagtagaacatttgatactgtttgtgtacttcaatcgtagtttttaaaggaagcaataagaacagctactctagtatttcaaattaaaggaaaaaactgatgcaaatattctgtattcaaaccattttttaaaacagtcaagatttataatgaagggaatgttgcatatagttacatatatatgcattatttatcatgtgtgttagacttgaaagattcccaagaattaaattctaaaaagagagaaaactaaaacatgatttcagttttaaaaaaggaaagacatccaagaaatgaatgtgcatgcataaggagctctaatcaactctttctttaaaatgacatgtataaaaatataggacaggcagactttttacctggagtggatagatattagcaagagatttgtgagccatggtcaaacaccagaatggcaaaggcctggaactagggcatgtacaataaggggagaggaaaaaagcaacatgtcaaagggcacaggctgtaactgaaaagacttagctgtcaccagtgtgaccctgaacgagtagagcctaagttttctcatccatagagtatatctgccctctcaacctcatagatttgtgagatctgtaaaataatataaattttaaaatacatattgtaagtcacacaataataatggctaagtttcaaaacaaaaaagggaagggccctctgtatttcatgtcgtaacaacccactcctaattttttcaccaaagagaataacccttcaatttgaaagggcagaactaagtgtttatagaaatttaagcccaaaataggcagaagggctgactgaagggcaaaagattggttggttggtcttttctacccagttgttcctctaggcagatgtgaggttgtgggctagtgcttaggttcttcaatttcgagaggttgtcagttgtactttgatttgtaatgtagaaagatctgcctttgaatgacaaaacagaatacccacaactccagccccttgttcccatatttctttggaaaactcaattctgggaaaacattcatgtaagattagtcacacagacagcaaaacctttcttgacagaatgctaggcaaagctttgcgtctcctaagcatctggtaaacttggactgtatgaatctcaactggttaatttatctttattggctgccaatatattcaaagccagtatatagctgcattttaatgactgtgtaacactttacagcatatattctattagttttcttttgttaatttatttaaaattccttttttcttcactgaaatttcttgtacctgtttttgttgacttccatttattctttttttttttttttttttgagacggagtctcgctctgtcgcccgggctggactgcagtggcgcgatcttggctcactgcaagctcctcctcccgggttcacgccattctcctgcctcagcctcccgagtagctgggactacaggcgccagccaccacgcccggctaatttttttgtatttttagtagagacgggggtttcaccgtgttagccaggatggtcttgatctcctgaccacgtgatctgcccgcctcggcctcccaaagtgctgggattacaggcttgagctgagctaccgcgcccggctttttttttttttttttttttttttgagacggagttttgcttttgttgccgaggctggagtgcaatggcgcaattccggctcaccgcaacctccgcctcccaggttcaagcaattctcctgcctcagcctcccgagtagctgggattgcaggcatgcgccaccatgcctggctaatttttttgctgtttttagtagagacggnnnnnnnnnnnnnnnnnnnnnnnnnnnnnnnnnnnnnnnnnnnnnnnnnnnnnnnnnnnnnnnnnnnnnnnnnnnnnnnnnnnnnnnnnnnnnnnnnnnnnnnnnnnnnnnnnnnnnnnnnnnnnnnnnnnnnnnnnnnnnnnnnnnnnnnnnnnnnnnnnnnnnnnnnnnnnnnnnnnnnnnnnnnnnnnnnnnnnnnnnnnnnnntaaaaacacaaaaattagccaggcatgttggcaggcgcctaatcctagctattccaggggatgagatgggagtattattgcttgaacctgggaggcacaggttgcagtgagctgagatcgtgccactacattccagcctggatgacagagctagactgtctccaaaaaaaaaaaaggaagatggtggaagactgcacataaggaacatgtatgtctgacatctgattctggtttccacagactggtaaacctgcagagaacacccagcaaaattctgcaatattttaaaattcagtttgtgggaaacttgtttccctccctgcaacccccacccccacttgtttttggatgggagtgaatgggggttcaggctaaaactcaactgggagtcagagggcgagttctttgcagttctgccactgactatctgaaccaactgatgcgtcaaaagttttcctgaaccttaggttcttcatttgtaataaaggaataatctctaaggtttcttaaaattctgatttgaattttaaaactctgagttactgctgccactgcccaaaaatatttgggaaactttttggaactgcttccatatgtttgatgaagctcttaagaaaacttgtgtcaatctcatagccacatctccatttgaaccaagtacgacattacctagcttgattcacatcacattaacttcaaatgacacagctctttttaaaactaaaatcttcaacaggaaatttgtctctgttaaatatatgtaaaatttagattctcctctaaaaagccatttaaaagtattttgaatggtaacattattagaattagcatatagctttccagagtaatttctttgaagagacaaggcacattaacttggtgtactgtttcataagactcttacaaagtcatcctaattaaagacatgttaaatataagaaaaaggctttagaatcgataaaatacacagtatgtaggttttaaaaaagctatttgtaatactatatctcaaactacctttttccatttttggaacacttgggttggaacacagaaccctaaatgttaacgctttctttattgtaactataaggcagtggttctaaaatgttgctgcacaatgaaatcacctagagatattttaaaaataaagatgcctggctccctttcccaaacactgacttaattggtatggagtaggagctaagacacaggcttatgaaaagcttcccagctatttctaatgtgaggcaaagtaaccacgggattcaagtgaattaatgtcctacaattcagaaataatttacagattatatagattagtatttttcctttttgggcagtgacagtatcacttacctgaaatagacaagtttctcaaagttaagacagtgcaggccgggtgtgatggctcacgcctataatgccagcactttgggaagctgaggcaggtggatcacctgagatcaggagtttgagaccagcctggccaacatggtgaaaccccgtctctactgaaaatataaaaaattagccaggcgtggttgtgcatgcctgtaatcccagctactcaggaggctgaagcaggagaatcatttgaacccaggaggcggaggttgcagtgagccaagatggcgccagtgcactccagcctgggtgacagagagagactctgtctcaaaaaataaagattctacagtgcaatggatgtgaacaattatcttgggagaaagttaactctgctgttagtttacagcctatttataattcacagctttgttttgtctttgatatgcagtattttgcattaagcaattatggttttttgggttttttttgagacagagtctcgctctgtcgcccaggctggagtgcagtgacgccatctcggctcattgcaacctctgtctctcaggttcaagtaattctcctgcctcagcctcctgagtagctgggattataggcatgcgccaccacaccctgctaattttttgtatttttagtagagatgggctttcactgtgttagccaggatggtctcaatctcctgaactcatgatccacccgccttggcctgccaaagtgctgggattacaggcatgagccacacgcatggccaagcaatgttttacttgtattatattttccctttggaagctgtgatgtattgttttttagtcttgaacccaaagcattactactgagttgcagtgttcagaaagatagttatgggtgctcaaataagtctccctgctgcacgtgagtgtttcaaaggtttggaggtgtgacacagataggaggcaaatcagtgcccttgtaaagggtgagcagtatcttattctaccattagggctggcatcacagtgtactgagttcctacagagtatgttttaattatgggggacagtgattgtaacaaaggggctgaagactagatgaatcacaaccactgaagacttgcagtactttgaatggttaaaagctacaataaaagggaaagttgctttgatagctgtggaactaaagggttactcttgcctgccaaaaataaagtgctctgtagtaccctcataaaagtaggataggagacttaaaagcaaaaggatcataagagaccttataaataactccaaggccaaaattttctttagtttgtcttagtaattacacatgacttgttaatgtgatcagaaatgtacactcctgcgtgtatgcggtgtcagacaggccactaagtaatgtaccaagtgccccatcccttacattctggcttcaccaccacacctcactggaactgccctctcattgtcagtgttaagctcagtggctttttctttagcctgatttgctttgcctttctccacttgatgttgccaccatatcctgaaatgttaccttatctgtcctgtttattctctatgaatagtccttgacatccgttgctgattctttttcttctcccccaacctatctttatatactttactctttctactctttaagttctgagctaactcacagatcactccccaacctgaatggtttccacacctatttcagaaacttttattttgatgtctgtcacctcatatctcagtaaataaaactgaactccaatgtaggtgaaggaggaacgagttgtccagaaagaagccatcaatggatgactcatgaggtatgaatgcctagaatatttgggaaaaaatgaaatatagcccaagtaagtctaaaagaggagtagcaagagaatgaggcttggggagacaggaggagcccagatcaaaggactttaattgctatgcttaggcatatctttttagcaagagatgccattgaagaatctgaagcaatcacaaaggttcatgagtgatgaaagctgcatttagaaagctctcaactggtagcctggagaatggattagagagagacttggtgagacaaagacagggaggatggaaaagaaagtatttagaaggtactatgagtagaaatttggttaatgattagaggaggtaaagtatctaggatggcccccaggttgcttctagtatgagtaatgggttgctggtattatttattgggctaagagaaacagattttggagggaagagagctcaaatggatactcaggaagaaacagccagtggcaattagataaacccacctaagatacagtagtgcctgcttcagcagcacatatcctaatactggaacgatacacagattaacacagcccctgcacaaggatgacacgcaatttcatgaagcattccaacagagaaaaaaaatgacagcataaaagtctaggctttaacaatagatttggtagtaaaaaccataggcatgggtgagattatctaacaattatgttagtgaaataatagtaaacgtctaataagagtgttttctatgtgccagacactagttacaaatccttaatatattaactcatttaatcctgacaacaattctatgaggaaaagaagaaagaagcccataggcagaaagaacaaagaaaaaacaagttggttaggcaggaagtaaacatgggaaaccaagtaagttttgagaagtaggccatgagattaagtgaaccaaagtgtccgtttaatttgac

SEQ ID NO: 788 - DNA, 1769 bp, Homo sapiens
ccgacgcagcggtgttgcacctccctctccggctctgctgcccgggatttccccagaacctgcgccgcgcgagaaggagcctgggagcatccgcccacactgcccggacagtcggctcgactcggtgctctcggccccagccgggctccgctcctcgggcgcgcgaggggccgtggtggcggcggcgcccggcatgtttcatagtccgcggcggctctgctcggccctgctgcagagggacgcgcccggcctgcgccgcctgcccgccccagggatgcgccgcccgttgtccccgccggctgctgttcccaggcccgcatccccccggctgctggcggcggcctcggcggcctcgggcgccgcgaggtcgtgttcccgaacagtgtgttccatgggaaccggtacaagcagactctatagtgctctcgccaagacactgaacagcagcgctgcctcccagcacccagagtatttggtgtcacctgacccagagcatctggagcccattgatcctaaagagcttcttgaggaatgcagggccgtcctgcacacccgacctccccggttccagagggattttgtggatctgaggacagattgccctagtacccacccacctatcagggttatgcaatggaacatcctcgcccaagctcttggagaaggcaaagacaactttgtacagtgccctgttgaagcactcaaatgggaagaaaggaaatgtctcatcctggaagaaatcctggcctaccagcctgatatattgtgcctccaagaggtggaccactattttgacaccttccagccactcctcagtagactaggctatcaaggcacgtttttccccaaaccctggtcaccttgtctagatgtagaacacaacaatggaccagatggttgtgccttattttttcttcaaaaccgattcaagctagtcaacagtgccaatattaggctgacagccatgacattgaaaaccaaccaggtggccattgcacagaccctggagtgcaaggagtcaggccgacagttctgcatcgctgttacccatctaaaagcacgcactggctgggagcggtttcgatcagctcaaggctgtgacctccttcagaacctgcaaaacatcacccaaggagccaagattccccttattgtgtgtggggacttcaatgcagagccaacagaagaggtctacaaacactttgcttcctccagcctcaacctgaacagcgcctacaagctgctgagtgctgatgggcagtcagaacccccatacactacctggaagatccggacctcaggggagtgcaggcacaccctggattacatctggtattctaaacatgctctaaatgtaaggtcagctctcgatctgctcactgaagaacagattggacccaacaggttaccttccttcaattatccttcagaccacctgtctctagtgtgtgacttcagctttactgaggaatctgatggactttcataaatacttgcttttgtctttttaatcacaggagtctatttttttttttttttttttttttttttgagacagagtctcgctctgttgcctaggctggagtacagtggcctgatctcggctcactgcaagatccgcctcccgggttcatggcattctcctgcctcagcctccagagcaactgggacaacaggcgcccgtcaccacgcccagctaattttttgtatttttagtagagacggggtttcaccgtgttagccaggatggtctcgatctcctgaccttg

SEQ ID NO: 789 - protein, 421 aa, Homo sapiens
MFHSPRRLCSALLQRDAPGLRRLPAPGMRRPLSPPAAVPRPDRLLAAASAASGAARSCSRTVCSMGTGTSRKAKTLNSSAASQHPEYLVSPDPEHLEPIDPKELLEECRAVLHWPRFQRDFVDLRTDCPSTHPPIRVMQWNILAQALGEGKDNFVQCPVEALKWEERKCLIEILAYQPDILCLQEVDHYFDTFQPLLSRLGYQGTFFPKPWSPCLDVEHNNGPDGCALFFLQNRFKLVNSANIRLTAMTLKTNQVAIAQTLECKESGRQFCIAVTHLKARTGWERFRSAQGCDLLQNLQNITQGAKIPLIVCGDFNAEPTEEVYKHFASSSLNLNSAYKLLSADGQSEPPYTTWKIRTSGECRHTLDYIWYSKHALNVRSALDLLTEEQIGPNRLPSFNYPSDHLSLVCDFSFTEESDGLS

SEQ ID NO: 790 - DNA, 110799 bp, Mus musculus
  misc_feature (1)...(110799): n = A,T,C or G
tgactttaagaaagaacattttgttacgtccttatcttttggcctcctgttggtgagaatcatgttaggcagtgaaattaagaacatgaaggcccagatgacaacagaaagaatctttgcacccaagagattgctggggctggacgttttaaatggcctggtggtcttcaggtagcggtcaatggttatcaaccccaggaacgatatactgatatacattgtaaaataaaatgtgactgaagtaacttggcacaccaaggttctcagaggcccggctcccagtttagcatcactaagaattttaaatggaaaagttagaatcattagtagatcagagatgaccgtgttcttaagaaaaatgatgaagttggatttactgcggatctgaaagaaaatcctcattgccaagctgttcgtgatgagcccagcaaagaacaggacggtgtacagcaatgggaagagaacctgggtgatcttgtagtctctgacgcacagggtgctggtcccaggggagaaggtggtattggctgaggtggtgttgacaccaggcacatccatggtcctgtagtagaaagaaagagagagagggagggtgatcacaggtcattggtttggttgttatcttcatacatacattttagaattacagcgttgcttaaaacttgagttttttttatctttactgtggcagttagtaggggtgaatagacaaccgaatccctgaatatctcatctacacaagaattccatctctagcaacttaaaacgaggtggtgtgttgtgagatgtcatgagagctttgtgcttgttttggttgaaggctgtattttacaacactgtggtcttggtgtcagcacccctgtgttaatttcgaaaagcctaatgacaggcactctagtgatgctttgcctatttcccctgcatcttcttttacatggccgagtagccttttgtgtctgtttacagctgcctttccttctctgcccatattcctggtttcactctttagtatcattgatgaattcaatagaggagtgattaattatgagttggaatcataaatggagaatttcaaagagattggtataaaatcacttctgggaaatgaattcatatattaaatagtaaatagtagaaaataataatccaaaaaattttcctttgcattgagaaatatctttgcctgtgttcagtcatgcaataaaatattagcctcacagagactcatgatttagagtgcttttagcccatgcatttctcattttcagctcattcattatatttgaagtttgtatatgtttttgaatatcattcagagtgaatcctaaaatggtaataatgatgatgcaggcaatagattctctatctgtgatcattacttgatatttctcaaggcagccagagcatcattcctggcatatttaatggtagctaaaataaaatagcagaatcggatccttatctgatatcctagattatcacacaacagacgggggaaggaataggagcagttgacttggctgtcttgtatctaacttgaaatttaagatgaaatttaaaacttttcaaatttccatcaaataaataaaatgatttttcataaaatgggattcctcatattcaaatatacagtttgaaaaccccacaaaactctcatgggagatttaacgtgataactgaagatagcacatacttccctctaatgtcaatgggatcctttaattactgaaaacgatacagttaagaataataccagaagtatgagctcagtcctcagcccctcatccaacacctcagagtgactgagttcaccactgagttcaaacctctttgcaattgttagttccttttaattactcatttcctggatagttctgaccactctaccttaagaatgctccttgtgtagagtaggcaaatcatttaacaatgttcttgactttgggagtttccactcctttcatctatttttaattctcattttagggtcaaagcatcaatatttctccatgcttagcatattttcattgaagaatttcgtctcccacaccactgagacttatatcttggtttaattaacttaatgccattccaaacatatgcttctggttttattaattgctatataaggctttcaatttcaagaacaaacttgagtgtatataatatatatatgtatataacatattttttcagaatataagtagatttctgttaaatgctaatataacaacattacctggttctgctgaatctgaaggatatgagtgtctccgggaatactagttagtggaacttgcagactggcatctgttgctttcttctcagtgacttgcataagttcccaaagccctctgtgatagagactctgcagagacttcagcaaggcagccttgagtgttctagagaaagagaaaggaagaagggaagaaagcacaccttccatgcaggctcagagcagtgcagactccgtgtctgtctgcagagaggggaggaaaacagcccccagtagaagattgtttaccttctgtgaatattcagagctctgcagactccagtctgtctgtttttaggacttctccttttattctgtagaaaacattgaggcgaaggtggctgagaagttgtcttttaaaaagcaatttaagatattgtgggtttttgtttttataaattttttttctaaaacttgaaatagtatcattaaagtagaggggttttgtttgtttgtttggttggttggttggttggtttggctattttccataaatgataaatccaagttgagaggatgtcttctaaatgtgttcctggagaatgctgcaggctcgctttcgcagatgactgttcacctgaaagcatactatgctcaaagtggacgatgtgtcactgtctgacaagtaattgtatcatctcaaaatatgtgctcccatggggggagggtaagccttctgcttctcgttttatcctagttcataatttcattatttgcaatctgggtttgattattgtctttgtgggtaaaacaacaccatcatcccattataaattattagttccccaaattacattagggaaaaaacagttgtatacagtgccaggctgattgtgtgaagcggccttcatggtttccgtgaacagaacttaggtaacagacagtgtttctttatgaattgagtttactgttaaagataatattgaattaatcagcttggtaactattacatgcagtttttaacttttaaacgaaaaaggcaagatacacttggagtgaaattgtaggttaagtttgttactgctgtatatttgcgtaactatttctggctcccgcgatggagaaaaggcacaagcacagtatttccaactgaaatggccgttagctataaaaccacatgaggaggtgctgctacttggaacatatattccatatattctgaattttgagtgtgtttatacctattaaatcaatttaatgatgtatcatggaagctcagcatcacttgaacatttttttaaaaacatgcttaggggccactgcctagtttctgtgaaccagaaacccccatttgtgtttaacctcccttctatgtgatgcctaggcacagtaaagagtgctgaccacttgattaaatggacattggacttttattgtcactaaaatttgagggcaagctattgatctcattcactttagcaacattcaaatacatagtaggtgcaatattttttacctagaaagaagtattggtttgattttaaacttttcagaaagtttatatgggctgctttacctttgtacataaacagtcaattaaacttgtcttatttgttggtttggatatttgagatactttttaaaaaataatttacttttatttcatgtgcattggtgtttttcctgcatggatatttgtgtgaaggtgtcagatactctgcaactggagttatagttatttgtgagttgccatgtgggtactggggaatgaacccaggtcctctggaagagcagccaattttcctgaccgctgagccatctctccagcccctgaaatattttttaaaggagctttatgcttcaaaacgataattggcaacatttcatttcttatgctgccatgaaataacccacatttatcatattagctagtactcattttatcttcagtttttcccatcagaatgaagggaacttagtagaatagccaggttaattggaggccctactcaaacctacaaagtctgctctggagccacccttgtctctgagtccatcctcatgccatctctgtagtctctttccccttcagggcccaggactgagggatgaatggctcgtgaagtggctgcactctgttttgatcaaataaccactataactgcctttataacaaattctaaactctgggatatttatagtatttctgagatctcggttgaaaccagtcttctgaaggggaattacaggtttcttcagtgaattagtctcccacattaaaagaaaatcaattcaagatttctaagtctttctttactgagaatatgtgtgtgtgtgtgtgtgtgtgtgtgtgtgtgtgtgtgtgtgtgtgtgtgtgtgtgtatgtatatgtatatttatatatatttcaaatccctaaaacattctcagcaggcatttgaagaataaaacaaacttagacctaagctagcttcatctttcctgagaattgaagtgacaaccacaaacacctctttctgaacttatcacattttctccttgtagacaattgccaatttcccctttgaccaccatgaaagcaactgaaagctttagatagaaagtgactcatcctaaaactccattatcatatagcataattagtcggacacaccatcttcccccatcagtaaacagcatcatcacatacggtttataactgtattatagggaaatgaaatttaatttgatcatttctaaccaagataatttggaaaattgaggagaatttttattttaaatggttaattatttgacaaatcccttgaagataagcaatacttcctgttcatctgaaatctattcaactcatacatggcatatgacttacttatgcttacaacttacagctcatacataactcatagcttacttactctaagccaaagaggccatgccttgaagtgcatgtggtccttgaaaatctaggtttcagagggagaatgaagagctaattggacatttgattatcagttgggatcttgcaattgtcatgacttttatttttatatcaatgattttttttattgaggacatatattagtgttgcttagctttattgatcatagtaatttaggttatataaacaatagctttcaaaaataagtcatcttgggcattgggaatatttagaaagagccaacattgtctttgctggaaagaatagaaatagtgtatcacagactctgctactggagaacaggtatttccttcaaaaatatgttatctgctttcttgatttatgagaaagggcactaccatttaggaacagttaccaataaaaagaagctgacagttacattgtcctatggtacagccattatccttctgtgtactcattcactcttccagcacaaggctaactacgaataaaacatttgagttatttcttgaacaaattagtgtggttatagtgagattcagccgaaagaggtcatgttcaatggcaagtttttaataatttgttttaataatttatatttgaagatgtagatgtttgcttttttgttcattcatgaatataatgtatacattactcatgtagtacagggaattgaacccagatcttctcagatgcttgacagatgctctaatgctgtgctttactctctgtccctaattctttgttcgtatttactgtggttcatggtgggctcccacttgaatattcagaaatacaatcttaagatgcgacttctacgtagtgtgttatgaggataattgcaataactcatctgtcctaagtgtcccagagaaaggaacagactcagaatatttttcaaagacttatccataaccactaattctaatattctttgctcatagaatctctttataaataaaaatatatatagaaagtaggaccaggggaagcagaacacatctttctgttggtctcaaccctattatcacacaatgtgagacacacacacacacacacacacacaccacaaatatgtatattttggcagttattatcgacatttattttaaagaaatcaaggtgacttagagaagaccttaatttggccagctctattatttcctcctaaggatgtctacccgagaagactctgtcagactttctatggtgggtgagagtgctgtgattctcaaggttcagccttctagcttcatagccagataggtccctgtgagcatgatgtaatgcctagagaatgaagtcattgatctggaggatgttcttatcaaagctcagttaacagagacatggtaaactctcagcatttaccttaaaaataaagacttggacttctgtagaaggttcggttggtccttttatgcccagtgaatatactcttcaggaaacagatactaggataatttttggttctggtctcagatcattaatgttactcaaagaatgcagtatggggatgctaagatgaaatagtagaaatccactgccacatttgcaagtatttaatatataattgtaagttgagctgcttatctgatcaattcagtttgaggttttgtacacttttctatttgtacaaaaaaatagacataaatgaatcatttagcctgctgggaacttcaaaatgtctctcccttgctggtggaaagccagtaatcgttactactattttcctgatattaagtcagtatggtcttctccctggcaaatccctcccttttcattgcatgctgatctggagtggctcaatttcatctctctccatcagggctgtgcttcctggctcagttgcccaaggacatcagtaggctaattagaatttgaagtttctcacttcttcatctccatacttctattttccttagtttgttctcccccattccctgtggttgggtaaagcagtgtccttgtctctcctgttaatcgaaacaatactccattgtgtcccagctcttaccagtaatctgctctgcaaacgtgatgtcctctatggagacttctttatctgtgtcatatctttgaaactggatttcctgcttattacccaagtcaaggttctcttttcccttcatttgtacttcatgcccagcttctagtaaactctctgccaccccctgttccttactcctgtcatagtagccgttacttcaccccatcacttcctgttgtgctatcttcacaactagtctggagaaactcctcttttgagacattcaggtgtttttatgaaaacaaacaaatcaaaagaaaaaccacaaactacaaaacccaaagacatcccatctaaactgactccttacctctattacctattggatcattggttgatggttcctattactgtgtctccctgcctaatttctaggctttgtatggttagagcatcctagtaaatgaagaagcacgcataagcatcatttaatggcttgcttgtattccccactaccttagctacctacctactgttcttgtaggatgtggatggtttgcacttccctcagaactcagtgttcccttactgcctcacttctgacctgcattggttctacatcacactaaatacatattaactatacattttccttttaaaaaaaaaactaaacattttcatggtttttctccaacaactttttcaaagtggatcagtgaaattcagagagatgcatgttcactcattggaccctaatgtctgactcttctcttccccaagtgcctctgaaattctgctttcagttcctcatcctcacaactaagacttaatgcactacacagacatgagctgtctacctgtctctcacttcttcagtcttctcagcactttagcaacctaattgtttcctataaaacaatgatttttgtcttcttttcttcccctctgtcttctgtccatgagtttgttccttagtctactggcttcctttgtgcttgctgtgcttgccaactttgtgcttacaaaagagaataaatagaggactcagggaagatagccattgatgcctgccaccccttctccaataacctagaaaatcactgaattgtgtctgatgaatgctgcaaactcttctttcctttcctaatccccatgtgctgtggacattgatggggccataacactgcacctgtagacagatgtcagccattgaaatcatgcatcttagatggcaggaaaggcatagtgggttatgggaggtattggctaatgcaaaacagtgtggactctggatgcatgtggaagaatgggagtctataatgtgaagagtgagcaccctgtatgtacacagtactcttgggcattgcgtgtattgttatgtcttgtttattctcacagatccttaaatggaaggtggcatcacactgttttcaggagagggatctgaggcaaggtactaggcttattattactcaggagtatggggttgttgaatgtcatgactaggataaattacaaagctccttcttccctaagtatggtgtactattgggatggggctgtcttgagttgttattggtacatggatcttttatctctcaccatccctgttaggatctccgtaggcctctgtaaatacttggaacatgaagaattagcagaggggtagagaaagataagtcaacaggatatgcaaatatgtgtattatttctagcactgtatatatataaaaaaataaaactagggtaactgagttggggcctgaaggcaagtgtgtacttcaaggaaatataaaacctgacagaattggagagtggacatggtgcttcctcagctgcagaagcatggtactgataactgtgttcacaggacacacagagttctaccagtgagtgtcactgtggctcccccacttctgaagggttcgttctatagttgcagccatcagtaatggtgaacatatgcaatccattttccctgggaggagttctttaggataagaggtgatgccttttagagggctttatacaaagaatgacaaagggggaggtatattgaaaggtccaacagaaaagtaaataactttgctcagaaaatggaaaacaaaagatcccagggagagattagcactgagagatttaaggcagtcataagagtgaggctctgccttggatacttacatttggctaaaggtaaatggagttctgtgttggattcctgcccattactcaggtcatttattttcacacaaggaaaaaaaggagtgcttgcatttgcagtgatcattagaggagaccgaggtctaaaacctcactcgatcatctccgattctgaattcctagccacttagctcacgcctagtgatcccaacactttgctttttgtcatctggaaataaatactaatataccttatacggtcatgttgacgtaagtgtcgtacattttttttctgaagatgcttgaaggtcctagcaagatattttttttcctaattataaaacacatgctaatgccatatatctaagaccaagctcactaaggaaatggcattttccttaaggacatagtaacatcatcttatgccatggtcaaatttagacgacagcgacaacaaaaagtctttgaacagccagaacttactctgtagggtacgcccacatcaagtgcttcaggtcgggtagcacgttattattttactttagcatgttccaaactggaaaaacaggggtggtgccggtgaaggtgagttgccaagcaggtagatgccacccctgcaagcaggcatggaaaggatgtgattagtgtggtgcaggagaagaaaatgtacccccagctctgcaaactggtttcaggggctgttgctgtttttcaggatgaatcttcaagtcatgaatgtaaccagcgcacaatccttctctatggagtcggaaaagagcgtgatgaagccaggcatcagctgaagaagattaccaaagatatcctcaaaatcctgaacaagaagggcaccacagaatcagggggtaaggcgcctcagtgccctggctcccattgcgtttgtgctccctctgcccacaggccttatcagagcgctccatgtcactgtccccagtgtttcctctcatgaatgactgtcacactgaaatatgaataggcacatttacactctaaggccttgcgttcattattagtagcattcgcattgaccgccttttgtagggagatacaggtgagatttgtactttgtcatctgggtgccaagctttctatggtcattgctgtgggtgatgttctgagtgacgaggaggagaaatactctgcctgcaaacagccagttcacctttcctttgcaccatttgtttttgctctgtgtttcacatgagtggcaggtcatcatatagatgctgattccacattagccaaaacctaattgccatagtagccatggctaagtctgtcaccacagaaaagtgaaagaggcaatttgatctttttgacttggaattttctttccctgttcttctcacatgtttttgttgttgttgttgttgtttctttcagagcttggccctcatagtgcgtcattgtgttgcataattgaagtcctataattatctattatctattatcatatttgcctagttactctctttaaggtttacgtcatttcataatcatggtttaaaacatggcatcattttctaccttagccctgccactgctcgctccctctctagcatggtcattcctatgaaggaggacagggttgcgtttgccctatgttcacagctggttttcctacttgagtagaaacccctaggaacctttccatttttatgacgttaatggggtgcattattagggcttgtttgtgtatgctagattttttccctacaggtggaaacaattgtaacttttgtctgccatcagcatgggtaagcctacctgagcgcaggctgtctgctggatgggctttggagaacactgtggggaagttgccctcatgtgatctgtctccacccctggctcccttcccttgcctgtttaggaccttcaatatgccagcgccacaagaagcaaccaagagccgagaaagggaaatgaaactgtcttctgttggcttcttctcattgagcttgaaaaagaaactgctctgtctaagaaaactctccttgtgctattttttttctccctcagagaaaacaggaaataagttgcgatagaagcctgaatatggaaggctcacaagtccctagccaagggcatttgaagtagctttcgggggagttggaatgcggtgggaggtgctgatgtctataagaggcacagtcacgcttaattcatctaaattagtgtagagggcctttgcagatttctgaagtttatggtggagaaagaccaaaggaagtgggaaggggaaagaagcagtcttgctgtcaagcttccttccttccttccttccttcacagttttgctttaatgccaaactagtcttgttttgtctttgtgccaaccccttaagtagatattcttccgtatggactacaaaagagatattcactgtgcgggctttcaaagtattagtcacacaaacaccacttcaaactgacatcttcctcgatttaatctcagccacagtgcacagccacttggtaaacagtcttcattttaagttattatttaagactttgtatacaagaagttagccaactgtatttgaggctacaggaaacttgtatacacacacacacacacacacacacacacacacacacacaactactttacttagcaatgtgaagattggaaaggaaaaaaggaaactatcccttggactagcatgtgctttaatgttgagaaaacaaaaattagacttttgaagaaccctttaggacacttacagaaccagccagtcttcccctaggggatttgtaactggaagtctgttgttatgttttgtctctttttgagatggagtcttctgttttccaggcaggctggaatttgagggatgaacccgaaagtctcttccccctgcttctgtctcccatgtgctaggattatgggctcccaccaccatgcctgtttatgtgctgctaagggttgacctcaggcctgtgtgatgctaagcagacagtctgctgcctgagcaacctctgctcccctaacttaaagcttaaacactatttccagttaaacagccaaatttcatgtcaacttcactataacattgtctaaaaaggccaatactttcagaatttaaaggcttaatttttttatgtaaaaattaagtattgaaagagcagtggtgcatgccaggaaaacaaggaaacgggcaaaagaataaaacaatacaaaacaaaacctctttatatccccagtgtattgttacttatgcaaacgacactgaaatctttcatttcaaagcatcattagttatcagtggtttcctttctaggttacaagacccagttatatcaagttgagcttttatgaccttacatgttcagtaatggaacctgtttatacaaatgagcaaaggaaaatgcacttgggagttctgagctaggcctacttccccaagtcttctgtgtttatttcgatccaagggagactaaatgattaatatgaacacaagacagtagtaggttggaccctttcagttttggagcaatgattctagggaattgaaaactaagtcaaaacttgggtatctcaactatacttatgatacatataagagcagtgagagagaaggcctcatcccacgtttaacttgtgcttatgagaatagatgctggaagagaaggaggtctaatgacagaaggaagtttttgtcatgtgttttaccagcacttccttaatgtatgtgagcatggagggtcagaaaacaaactcaaatgtcattcttctagtgtcctccactgtgttgtttgtactttgaaacagggtcttttattggcttgtaactcagcgaagcatgacttgtcccatctctgcctcccaggggctgtgatcgcaggccggtgtcactacgcctagcttttttttttttttttttttttttaaaacatgggttctggattccgcactcagagcctcatgcttgcagggcaagccatttgctaaccgtgctatctcccctgcccagtaccagctctttttactactctgttcattctggtatcaccatccattgtacaaagcagaaacgtgacaactcacttggattttgtatctcacttactgttcaaagggaggtccacttttgatgtggaggagcttggagtcttgccaacttctagagcaataagaaacattttgttttctgagctaacaattcccacatgaaactgagttggagtgctccctctaaccagatggcgcacagtgctgtagaagtactgtaacccaaccattactttcatttaaaaatttgtctttgtatatacatagatgaaatcctgtttccagagactttaattttgctcttagttgttaagaaaaccagttttcctcaaataagcaaaaatatacatatatttactgatttataaaagtacagaggtgagtctaaaagtcagtgaaatggctcagaaggcaaaggatcttgctaccaagcctcatcctctgaatttgatgtctggaggagagaacacccttaaatttttcttggtttaccgaaatgttccctgatgagtgcatatgaatacaaaataaataaataatccatatttttttaaaaagcctgtaatgtatcctgtttagtcacagtgggccttggtgttccccacccaaccgtggtgattcattactatatctttaaagttacttaatgatgaatgcttgcaaagacactttataatagccagaatcaagtcattatttgcaagaataagtagtggcatatttttatgcattggaataaagtatgtgaaaattactaacaattagtacacattaaaattacctaaataatgaggctatcttaaaacatagtgttgagtgaaagtttccacccacccacgatggaagctgtccaaacctttggccccttggggagggagaggagattagagtcaggtaggtggacttttgaggtactatttcacgatttggatctcattctgtttgtcaaaatgcatagagtatatattgctttcatctattattgtgccatacttcagtaaaaaatacccatataaagatgggatggggaggtaactcagtaacgttccaagtcccacataaaaatagctgggcatgatggagcagggttgtaatcccattgctgtggaggtatggatataggcagaccccttgtgttccttaaacagccaggcaagctcacttggtgagttttggccagtaagagactctgttgtagagtaccatcagagagggtaaactccaatggtgtgattgcctgaaggatgacaccaggtatttccctctggcctccacacacgtgtacaaacaagtgaacatgcacacacatacacacacacacacacacacacacacatcaaaaaaatctttagaaatatgaagagattaatttaaatggaaagtaatacatctgatgtttctttagttggggacgaaggacagaaagccaggaagaccaagcaggaagtttttccaaccccggaaaatgtgttcacgaaactccaactcctctcatacttcgatcagcatcaagtaacatctcaggtatccattcagggctgtttgtcacatgctttgaatattcctcccttaaaagctcaagcagtgtacttccagccttaacttttacaaatgacccttatagacttggaagcagaacaagcttcatttgtgagtattaggtgtttccttcaacacctgtttttattatgtaagtatttttgctttatagtaattattaattcataaaggtaattcctaatatacttattatataacatgctgacccagcatcactattggtgaaggagaaactttttgatgatttaattaaaatactgggaaatttagaagaaatccattgttattcagttaacatgtcagtttctgatgactcacacttttgagtgatttccctttggggtcaccagtatctagattatattgaaattttcaaatgatgtttgtaagaatgctgatttgtatatgttttgacttccacggaaatactaatttctaagtagaatcacatgaattcatatgtgttgctggaaaaaaacctaaaacgaaaacaatcgaagtgatatatcgaagtgaagcctcacccagactgttggttgtgtgattttccttgcttttgtctgagcagatctctaacaatgtgctggaacaaatcacaagctttgcgtctggaacatcctatcacctcccgttggctcaccatattcagctcatctttgatctcatggagccagcgctgaacatcaatgggctgattgactttgccatacaggtgccacagagactatactgtgcctttctcacatttaggaaagcaaaccaaccagacactagagtttatcttgcttcttcatactctttatttgttgatttaaaaaccaggctatcccttactgttgagcttgtctgaactttccatctgaagtgaccaccctactcagcccccaagtacctaaggctacaagcttgtgacctggcttacatttatatgaaatatttttagatttattttatgtgcatgggtgtcttgcctacagatgtgcactatgtgtgtgcctggtgcctgcagagttcaaaagagggcattggctcccttggaagggcgttacggatacttatgagacatcttgggggtgttgggtactgaacatgggtcctctgaaagagcagctagtggtacttaactactgagtcatctctcaagcctcttattttttaaacttgcataaatatgcaaaaatgtagttttatgaaataccatatgatgccataaaacatgtatatgttatgtatattcttatagcaaattaaacatacctattcttcaaacatcatttcttgatggtagaaactgtcaagagtccttttccctacgtttgctaggtacagtgcatcctgttacctatagccgccctgccatacatattacacgtgaagatatcttgctcctgtaagaacttagtccccactgattaactttccctaatcacttctctgtcccaactctctttggcctcttggaacttcatgcctttgaacatgtgccagttctgttacattaaaactatttaagctgggcagtggtggcacgtgcctttaatcccagcacttgggaggccgaggcaggcagatttctgagtttgaggccagcctggtctacagagtgagttccaggacagccagggctacacagagaaaccctgtctcgaaaaaaacaaaaccaaaaaacaaaacaaaacaaaatccctaaaacaaaacaaataaaacaaaactattttaagcacctagtacattttaaagtgtttgagacattttgagttaatagttttactgttaagctatagttggtgttagtaatacacaacttatttaaaactatgtatacgtgaaagatgtttttgttttggtgtcggttgttgttaccttattattttgcgttgggaataaggaaatgatatattctctctagtagagttaagcagtgaaaagcacaaatgattgttaaaatactctttataatttcatttgtcccactgtagttacacacattttagatcatttattccttgtgttaataaatagacattaggtttgatttttttctattgtacagttactccaagctttataaataagaatgtagttattatagttatcagttgtgttgcattgaaaggaaaaaaaaaaaaagaagcacaacaaccaaaatgaaaaagaaaaaaagaaaaaaaggaaaaaaaattaaataaagaatggggttgtttattaaacgcttagttccaggctctgggctttcagaaagttttggtgactgtttcagcactgactacatcctggttgggtgcatgctggtgtctagacagaaaaacattcgtttaaattagtaaaggcttaaaagtaaatgccagcaaaagcttgtgtgctttctgattccgtagcgtataggaaatgtgcactaggggttcactgaacggtttccctgtttgtcttcttccctcccctccaaccctcccttcaccccccccccaaccccacttctgctgcagctgctgaatgaactgagtgtggtggaagcagagctcctcttgaagtcttctagcctggcaggaagttacactacaggactatgtgtctgcattgtggccgtgctcaggcggtaccatagttgcctgatcctaaatcctgatcagacagcccaggtgtttgaagggtgggtatataagtagcaatgtttttgttttttgtttgtttgtttgtttgtttgtttgtttgtttttcttatcctaaaaggtagaattcatagtgaaatacagtgcatttgggagaaaaattatactgagttctaaaaaagtatttttgtttagactgttggtctgaagttttgataccactcattttgaagttttagatgtcttattaaagtttcaatgaaaacatcccaacaatggtcttaccaaaatattttgtagagaaagagatataaatggaggaagtgtgtttgattttttttttttttctacttacttactggcttcctcttcacctcctggtcatgcacagctctcttctcatttatgccgcccaacaacttactgcgagcagtgaatactgggatctggtcatctattttcagtgtacttttgaaaaaacaatcagacactacatagtccttgcaacactgcaaggattctttgcactgtagaaacttggccatcttctttctgactcatgaaagttgttcgtctgagtgtctaacggacaaaagcttctgctgtcgctcataaagtcgggctaaggaactgtctgcaagaggctgtgcttaaaaggccagggaaatgcagggagctctgtgcaaacatcgtgttgcctgctcctcacctgcatttctagggccttttattaaaaaaaaaaaaagacaacctattctttattcctctgtctcctcatttgtcttcttggttttcacccatcccctctgtaaccttacacatgcatttaatttataaacagtatttctctagtggcatctactttgcagaggcttttctttgatttacatgtacatctaacttaagaagtagaatattacaagcctcaaaagctttacagtgagagaaggtgtgtatttatgtgaggcctcgctcttttatatcgttcgacaggtgaagagtttggaagtgatgtgccccatattcattacacagctagtatatgttgcaaattgaagttgactccttactgttttttcagcactattcttttaaaatcattcaattttaaaataataattcatttaacaacacattcactgatcatgaactcatacatacttagttggaaaaagtgtttttgtttggttgttctttgattgttagtttgaaattgttttaatattttaacatttaaaatattaacttaaatactcataaaattatatttggcttaactttgttatatttttaccttatttataatgccctagtttgctcgttgttgctacggtaaacgctgtgaccaaattcaactttatcaaaggttgtttttttgttttttgtttttttgttttgttttgtttttcagtttatagcctgtagttgtatcattgaagcacaccaggaccagagctcgaggaaaaactctggatgcaggaacttactggcatgctccctttgccttggtcagctagctatcctatacaacccaggtctgcctgcctagagatggcacaggctacaggaaactggaccctccccttgtgaagcagaaataaagcacgtctgtccgccccccccctcccccccgtcattcccaagtgactcaggttgtgtcacatagatagctgtcttaactattgacacaccgtatgactttttttttttcaaaatcacaatcccccccttaatgtgactgagagtatcagaccacagtccaaggctttagtcttagaaagtgaaaactactgtaagatggacgcacctacccatttgcatttgtttactttagtcgcaggataagtctttactttccatgctctgttgggatttgtttgcttctgcatacccagcagattcaggtgttgcttccctcttaaacgatggttccattgtctgtacctgttgcccccccccctttttaaaaaacattccatttaaaaaatctttttattttttttccctccctcaactcttcccagttatcccctttatcaggcccttccctccaaatccactccttttccattttccttcagaaaagagcaggcctcccagggatatcaaatgatcaagttacaacacaactaggcacatcccttatatcaaagcggacaaggttaactcagtgggagaaaatgggtcccaaaagcaggcaaaagagtcagagatagcatgcactcctgctataaggaatcctaccagaacacctagttacacaccgtaacatatatgcaggggacctagatccgactcatccaggttgcttaattgctggttcagtctctgtcagcccccatgagcactgcttagttgattatgtaggccatgttcttgcggtgtgcttgatccctctatctttttttttttccattttttattaggtatttagctcatttacatttccaatgctataccaaaagtcccccatatccacccacccccactcccctgcccacccactccccctttttggccctggtgttcccctgtactggggcatataaagtttgcaagtccaatgggcctctctttccagtgatggccgactaggccatcttttgatatatatgcagctagagtcaagagctccggggtactggttagttcataatgttgatccacctatagggttgcagatccctttagctccttggctactttctctagctcctccattgggagccctatgatccatccattagctgactgtgagcatccacttctgtgtttgctaggccccggcatagtctcacaagagacagctacatctgggtcctttcaataaaatcttgctagtgtatgcaatggtttgacccctctatcttctcctgtcctttctccctcctcttcttctgcgtgattccccgtgttcttcctaatctttggctatgggtctctgtatctggccccattagttgccgggtgaatcctctctgatgacagttatgctaggctccgatcaatagcagaattatccttaggaatcatttcattccctacttttttccagttgtgtttggttctgtcctaggtctctgggctatctagcctctggttcttggccacccaggcagttcaggtgtgggcttctcatagagtggctcttaagctggaccagtcactggttggccactcccaaaagttctgtgtcacctttaccccaggacatcttgtaagcaagacaaattgtaggtggacgatttgtggctggatcggtgtcccagtcctgcctctggacgccttgcctggttgcggaagatagccagttcaggctccaaatctcctattactaggagtcttcgctagggtctcccttgtagattccagggagttttcattgcactatatttccaccttgcccctcaaatgcccccccccatagttatctttcccagtactctctcctagtactccatcccacacctgatccctcctgttcccatgcccatctcccctcagtcccttgcaaaatcttctgtttcctctgcgcagggaggtccacgtgtctttccttgttactcagcctctctgggtctgtggattgtagcgtgattgtcttttactttacagctaatatccacttatgagtgagtacacacctcaataggacaaaacagcagtctacagaataggaaaagatatccaccaactctatctaaccgagagcttacatctaaaatatataaaagaactcaagaaactaaacatcaacaaaccaaattatccaatttaaaaatggggtacagttctaaacagaactttcaacagaggaatatcaaatgaaaaaaaaatatcaaatgagaaaaaaaaagttcaacatccttagtcatcagggaaatacaaatcaaaatgatctagagattctatcttatactgtcagaatcactatggtaacaaacaaacaaacaaacaaacaaacaaaaaccccacaagtgacagctcatgctggtgaggatgtggagcaaggggagcactcctccattgctggtgggagcaccaacttgtacagccactattgaagtcactgtggttgtttctcagaatctacctcaagaaccacttctggacatatgctcaaaagatgctgcctcctaccacatggacacttgctcaactatgtttattgtggctttcttcataatagccagaaactggaaataacctagatgtcccttaaccaaaaactagataaagaaaatatggtacatttatacaataaagtattagttcgctgttagaaaaaaaaatgacatcataaaatttgcaggcaaatggatggaataataacaacaacaaatcatcccgagtgaggtaacccagacaaacagcatgttgtcctcctttataattaccaagttccccatcaggtgacatccttcagactacctgggatattgcactgcggttccttattttcctggcatccatgtctgatgctggagaatgcctgtccctagtgggcctgaacattgcagactaccacctcttgatcttccttatcttctgaataatggagagtggtccactatgcacccagcctcccctttcctttctctgttcaggtcacctaatagccttctttgtgcagtgatggtggtaagatggaagaatattattaaactcttttcagagtctcagccattggtgacactatgggtgacatgttatgtggagtcctgtgtcggatacagggtggtggtggagtcagacacatgtatggatgggccacaggtgttgtcttctatgccatactgatggccatcttgtatggacagaggagccatggtttggaagggaagaaagtggctgtggtgttggtactcttgaaaggctggcattattataaaggatgcctctacagggaatggattttcatcttcgtacataagaagccaagataaatttgtctgtagtacaaagaagaggaatgggattccaaaccacggcttcatcaaactcagcagatttcctgcactgaagagttacttctttccaaactagtgaacttggcagtccatgtcaactaatggaagttgtgaaactttgtgttgacttaaacttctctgcctagccttttcttttttttttctagtcaaatcagcctaagtgatggagttttgagtgttaattgcagtgtggagaattcatttcattacatatgtttcttttaagtgatgtttctgagggttttttaaagcttttctagtattcagtgtaacaaaaattgatatttaataacttcatagttttatgagcaatcgagtttctttttatgtttgatacatacttctaagtgctgggtagacattaaagaattcattactcactattcacatactatcaagacacgacttttttattcctgtgtctctgtcctcaggttgtgtggtgtggtgaagcacgttgtcaacccctcagaatgttcttccccagagagatgtatcttggcctacctctatgacctctacgtatcctgcagccacctcagaagtaaatttggagacctttttaggtgagcaggaaaaagtaaaaaaacaaaaaacgaaaaaacaaaaaaacctacagacatgattatacttccatcatgatcacacttccgtttgttaatggtctgattgtggtttatattctatgtactgatgtaagccaatctgaagtgtttgatctacccgagactcatttagacagatactaaaatacttaatgataatagtacaagatttttttttcgtatgtacataacagtgattttaggtggcaagctgtacaacacctgtgaaagggtctcttatttaagatttcacattcttttagaagttctagatgagccatattgaagtcatgataaaaatctagcatatgcttatattttgatttaaaatataatttaaaatttgaaagtctcataatgcttttgtgtcatgtcctctttgttcccatcttgcctttttagcaggcttttcctgctacattggcttccacactctttctgggtcacaaagttgcaaatcttcccccttcttagtgattctttaaggctctatatccgtaattttataccacctcccaacctggtattttaaaatttatttcttctctttttaaaatcagtttagtctttagcaaatcatttgcccatgcatgaatgagctttaaatggaaggctagcacttctctaaataccgtttaaccaacacgaattaaaagcagttatttgcatggcctgtttttactcaactgagttacactgtgataaatccctatgtttgcggcatgatgcaagagtacgtgtgttgattatggacaactgaccggcttgttagtaagcctttagatgacagccattctcctgccaagaattttactcctgtacattaattgtgttacttggggaacatttttaaaacaagtccaaacgtttttagtgttagaagctttgtacttttatcttctcagaactcttactcagagcttataccaaattaatttttgcagaagttagagcctcgtgttagtgcacatcgctctttgtgtaactatggttacagtttcttgagtacaaacattctgtattttgcctttgctttcacctcactttgaatattctttcagagatttttgcaagcttgtttcatttgtgtctctacttttttgtctgtaaagtcttgtagagtctccagttcctttcatctgttgcttagcattgtgtgtgccagatattaagtgcctgttgggaagttacaggaggaaataatgtggcatagggtattgaaatccacaagatatgtcagtaatggttttctttgctcctccttgctctgtgttcagtttgcttagaaataccatgagctctgacttccatgtatagatcacatttgacctctcttcaataccccagtcacggccatcataggcatctcttgcttggaccaacttgcagagtccttctcattggcttcattgcctttactcagactcactatagcatattctcagcacatctgctgaggtgactctttcaaccagggatgattgtgaggcacccatggttgtcatctaggcagcatcaaactcacagctctgatggacattgagatgtgttggcttccatctctcctgtgttcctttcctttagtgtattctcttctgtctccagaaacccacttctggtcctcacacccggagcactgactacttgctgctgctctggctctcttcctttgtgtagtccttatgccttgttacacagtgtctgtggccttgcttgctggcagccttgtgttcagtgacaacccattctcagtcagtcattctgcaaacctcagtattggctagccttctctctctctctctctctctctctctctctctctctctctctactctctctctcactccatatatatatatatatatatacatacatacacacacatatatatattagtttggctcctctatgggatgcaaatctcctaagagcttatatttttctcttttatcccaataatattgtattttacacaaaagcaatttatctacactactgttaacactgttgcactgctgttggtaaaatatgagtggcattaataaataaaactgacaaaatgttaccatttgatttaaaatagccctttgtaaaatatttgaatgaagtaacaataaaaatacttcatttccttctattgcttcattttgagttttcagtttacgcttctcaaagataggcttttttgcaacagccctggttttagtggtgggcagcccctattattcttacaattgtaagtaccaggtggtctaagtgagttcattaagagcacaggatttatttttaagtgattaccagtggactaaggtgctcctaacaccaggagcagaggcatcacagataatgaatgcacagtcctcaacaggaaacggaaaaggagtgcagctctctgggcatagtgtacagtcagaggccagtttggaggttaggaaaaacatagacagagaagctacatgttcagtgaggttttggttagtacaatagcaattaaacattgtaacagttttaactaaaaccctgtaactttgtgtagggaggaaatttgagggacaggtcacactaatcacatctcctgctgcttgagcttctgcgtgccacaaaactgtgatagtttttccattaaagttttgaattgtcgttatcctgggaagaagagtgagtttctttagctacaaatgattgttcctgattatttttgacatactgatgaagctcagatttaaaacaagtttttctgacctcaaggcatgcgttgctttcattactctatcaggttttcctgagacacacagttacagaaggagcatgcctgaatttttggctcaattccccacgcgtgggcagcagagagtgggaagaatgagaacacattctcagtggcagccagcatcttatcaaaacagagaggctcctcttgggaagtagggtaaagaagagaaagagtctagaaaggaaaggtgcagagactcagaggttagagaagctcggatgcccgccagagaggttctccagagaagtctgaatttgacagcagagtggagtagatctcaaaacttaaggaaaagaagaaacgcttctgcagtttaatagaggagatttatgtgtcaccccaatgacagaaccttcacctgccaggattttggtccaaaaaattgtactacatagtaaagctcttgagcaggaaatggatttctgcttgtggatttactgtacacagctagagcacacaaagaacggagctcatatggaatcaaaagcttgggatcacaccattgctcgtcttgtctgcagagaaacattggagaatacattctaatttctcttatttccagtattccgtatctgttcagatgttgcccactgaaaacactcatttcctaaaacatgtttgcttccttgttcagggcacatgcccagctaggtgggaacttagccctctccatttggcatgttgtaagtttcttcacactatagaatgtatcatctgtattcccctaggagagcatgagctacacagatgccggagttttacctccatttgtcccagctgtagcttagagctcacagtagctttggcacagtggctattactgggcatactacacccaaagaaatagggtttagggcttacagtcggagttaaaacactgaacttttccttgtgtgtaattggacccatttttatttttaggttataacattttacaactactcttaagaaagaaaaagttgttagaaggctcagtaaatacattgatttttgtttccatctataaattaaaaatctcttcattaagcaattactctatctcagatattgtaccaatgctggtttacaaagattttgctattagtaatagtaggatatagatggtctaggaaagtcttagagtagttgccacttagcatgtctgtaagtgaagtgattttcttggttgctttgttctttttttttttttttccttttttaactgtcgttttctaaccttagtagtgcctgttcaaaagtaaagcagaccatatacaataatgtgatgcctgcaaattccaacttacgctgggatccagactttatgatggattttattgagaacccctcggcaagaagcatcaattattcaatgctgggcaagatcctcaatgacaatgctgccaaccggtacagctttgtgtgcaacaccctcatgaatgtgtgcatgggacaccaggatgccggccggtgagctgcttttccctgagtgcagcagctatcaagggcgagctgctttggagtttctttagtaatttctgattctaccccactctctcctaactaaacacttagcctgagaaatcatggctttggggttcttggtttggctgtagacattttttattggtggtccattttgaaaagcatatctaattttaaagacagcactatcttttgatataaacttgggcctagttacatcacataatgtctttaactatttatcctggtgttattaccgactgattccaggatctttctcatagaatatccccaagcttgtgtccttaacttttgatccctataaaatgtaaaattgtagacaaggtttattcagagaatcaaaaatatgctaattcatttcttataattatatgttgctgtgtataattataccttgtataaatacaagagggtattatatcctgaaatctaagtgatgcttaatgataatgaagtatgtattcagtgaacaaaccatgtgtaatcattttgtttttttcatatattccttctttttattaaatctttttttaaaaaaaaacttcagattttcttcccctcctggtccaccctccgactgtttcacaccctatacctcctccacaccccacacccccatcccagcagacctccctggggcctccagtttcttgggggttaggtgtaatcagttcttatttgttccagttcactttctgctatcttctttttttttcccccctaggataaatgacatagccaatttctcctctgagctaactgcctgctgtacagttctgagttcggagtggctgggggttctgaaggctctttgttgttcttcaaatcatgtgtggggatttaatgatgtcctctgcacggtggatgtaagttttcttaacttatcaattactaatttactattacccatcttttactgcttaattaactaaactctaacacagcaacatatttctctatttccaaaagtgatgttcaataccacaaattcaataaattaaaacaaaacaaaatagacgtaacagaaggaattccagtgtgttccctgttgcctgatttctagaagctaaggttttaaactatctcagctgcttcgtttttttgcagcgtggatccctcaccacagtacataaaacgtttcatgcatgaggagaaccaccatacacttaagtctaagtgtacagattttgttgttttgcataagaaaatccacgtgcagcctcaggatattcagtattctcaggctatgcctgtagagtgatggaataattgcccaaatcatgttccttgacttcctcgtcttccatgttgcacccatgatagagatagagatagagatagagatagagatagagatagagatagagatagagatagagatagagatagagatagagataaagatagagatatatattcgttccttaaacatttctgtagattctctatccatttatgcctttatcattgcttggggtgatctttgtcagagctctatatgttattaaagaaacttgacaattgtaatgctgaaagcttatttcctctttctgctgcttcagtgctgaatggacaggcctgcctccttatccacattccgtggattaagatattatttgtgcaaaatacattaataataggctgcttttccacaccaacaaagacctaagttattttttttctgaaatacatatttgtgacttgctgcacctagtaccagtcactaggaagattgctattgtggtaattgtgttctcttagtattttcttctaatattttgtgagatctggaatgtagagatttccctgtagctgaactaatttttctccccttcctttctctcatttttcatttttaaatatagcagccaattgaaaactttcagagttcttttaaatgaatcctctctcattaaaaaaaaaatgcattagttgtgacaggaaagaaggttcaggtgttagtgggtcctgttttcctgctagaggcttcaccttctccttcctgcctttcccataaatggcgtatgtattccattggcaagcatcagttatgatacaccttttattagcatctcaattttgctcttgtgttgtcttctctcagttgcatgcacatgcaactgacaggttaaaggccaacatctacctagaacactagaatatgagtaaacgtgctttgtcttatcatagtagcaataggcctaagaagataatcgcaagtcttttccctctgatggttcatatggaggtttgagatcttagtggtatcgctggtattctcttaggtctttgatattgcactaaaggatgccgggtattaaaacctgtcaatgtttttcttaaaggtgagtgacctttcattccatgattcattagctactttcattgctatcctgatagcacgacagtgtttctccctggaagatgtcgtgcaacacgtcgcacttccctctctcctagcagcaggtaagctggtcctgagctgcgtctgctattgtttcctggttggtagtcacctgttacctcttaagaacagggaaagggccatttttaaggatgtgtgcattgtgggatggcattgtacctgcaagagatggtagagctgtagtagctgttttatgcagagtgacactgaactctgggacaggaaactgccattgctttattcggggtgtaaggcagcatgaaggttcttcagaacgatataactaatggccttactaaacagaagggttatttaatgtattacagaaacgttagtagtagcaaacccgaaaagcttgttgtggagtttgtgaggaagcttgttttaaagcctcctcctctttccagcttgtggagacgcggatgcagagcccggggcaaggatgacgtgccgcctcctgcttcacctcttcagagccccccaggcctgctttttccctcagggaacaggtgagctggcctcaagagaaagctctgctttggggtttattgggcacttttggttctactgtgaccaagtgagctgtccagtttgtcatttcctccctgattttcatgggcttgagctgcgcatgacggaggagtgagatcatgccattgaagggctgtcggcaccttccatgatgtaatatgcggatatattgggaaataaaaatgaggaattaataaacaataaaaatgcctgggctgttaggaaatagtgtgctggtgggaagtctcagtctcttgtataccctgtgttgattctgagccatgccatctcagcttaagcggatgacaactcatttatttatctttcctgaggcaatggagggtattagtgaagtctggtgctaaatcatttccatatagagatggatgcatctgtgtgggaatcctgctaatctttggaccacatctctttgaggaataggaacgttgttttaataataattaaagaggaaaggttaagtaagaatactggcagtgtttctgtggggcatcaggtaatgcaaacatgtcaattaagtgcccacaaacaaccaatgaaaagtcttactgactgtgaatgattgcagaaggtggttaatggcaatgaagaggccactgaaggtttgttgttgtttttataggcaaacctttccccggaataagatcatcttgtgatagacacctcttagctgcagctcacaacagcatagaagtgggagcagtttttgctgtcttaaaggcaattatgatgcttggtaagactatcctggcctttagcttcttggctaatcaccggaagtggaggcaaaaataatttatatgcactgtaatttttttaagctatgagatttttttttagatgttttcattatatacatttcaaatgctatcctaaaagctcccctgtcctgcttccctacccacctactcctgcttcttggccctggctttcccctgtactggggcatataacgtttgcaagacccaggggcctctcttcccagtgatggctgactaggccatcttctgctacatatgcagctagagatacgagctctgggggtactggttagttcatattgttgttccacctatagggttgcagatccctaagctccttgggtgctttctctagcttctccattgggggccctgtgttccatcctatagatgactgtgagcatccacttctgtatttgccaggaactggcatagcctcacaggagacagctatcacagggtcccttcagcaaaatcttgctggcatatgcaattgcactgtaaattctaagcaatgttaatggaaacatatcttttgtttgcttgtttgtcctgggggaaaaaaattggttggctttccctaagcccaagtaatgggcacttcaaggattctgtctcttaactacggtgaccctgggagaaaggtaatagaagtactgcgtgttggttataattgtgtgcttcttcattgtgatgtaaatcaggtcctcattcccacaggatcgtttgcctttatttactgacggaaattgtacttcatatctttaataaaagctttatgtttcagccagattatattccaggtgcaaaaacaaagaaaagctggattttaatttcgtgtttctccatctgctgtgactctgaacaagtttgtattctctgccatattgtttttattaagcaaatggagctgcaatggtgcttgtattgctgatgttcagcaggaggggcacaggtttttcctctaattcacagtgcccaagattccctagacattcttactggtacacatttaacaagagtaatagtgctgccttctgttcatcggcagggtgacacctcaggatatttttatataaaccataaagcatttgaattaggagaactccaatattgcctacttttaactttgggtacctcattttggccataaccaaacaatagttgccacatcatgttataaagtagttcatgatttaaacagaattacaggatagacaggtttccatttaggtgagccttagataacacagataaaaatatagccttgccttgcttgacaaatggtatttgtgcatggcaaagaataatagcagtgtttataaagcagccttttaaaaataaatgtaaaagaatatacatgaaaatgaatatacaaatcttttcagttttctccaatacaatgttatttatatcagccacactccagagcaagccccatgccccagaatggttagccaacacaaagtgtattctgcttttgtttgtttgtttgtgttattttattgattatgttgtttagattttctttccttggttttggatttttttttttttttttgagaaggatcatggaaatggctggttaggaaaataggagagagatctaggaagggggaagaatgggcttagggccataaatattatacagccaatactcactgctgatttcagccagggcaaggagagctggtccactttactgattagtaatcattggggtcatgaagacaggaattagatttatctttagatatttttaagtctcatcaaagaaagtaagaaatatattttcaataaacttatgttggaagtatgaatgcccaccacatgtttcagtggcacccacaagatgagtctcatctagacagtgagccctttgtttgcagaactggactaatcccaagtaaagttgccagacttttcagatattcaaataatgtgggaggttcttggtctgaaaaattataatcagcacagttatatgccagtgaagccttagacagattcacatagattcacatagaatattctggttttttttctgcacaattgcggaggttctaacatagttacacagacttcagtaccccatatccaaagtaaatggaggtctacaaggggtctaagaaatgagctaatttttgctcttgccttatccactctagtgcttttaaccaattttttcccaactcttagctaccaaatatatattaagacaggaaaataggactattatcgtgaactttgctcctaatttgcatagtattttaacttgaaatagagatagatatttacatcatctaagtgtagagaatacacgtgtctgctaattttgaaaagtgctgttgaaataaataaactctcatgggtacagctactaggttttatattttaaggtacatgatgagtgtatgaaaacacattggtaagttgagatgtcttgcttatttttacccctatggtttttctgcttagttaatgtgtggtggtactgatggtgctgaggagagaacctaaggtctcaggcatggtagacaagtactctgccactgagtgacagccttagcccctctgcttctaagatttttgagagtagacatttattaggacattttgattactcttcctcccaagaaaagagtttttggggttttgttttttgttttttgttttttttttttcaacagagtcaaaaccttttggggattggccttgagttttaagttgtgtttgtttgtttgtttgtttgtttgttttggttggtgttgtttgcttgtgtttttgcattgatcttggcttgcttttactccacaaggcctcccctgaagtcagcctctggtttcaggaaatcatcttgtcaaagcttgttttgatttctatagggaaggaggcaaaagtttgaagtctctgctgctgtctggcaatttcactaccaaattatctcacactttttttttttttttgagatttttatttcatccaagtataccctgctgagtgttttggggagacaaatacctcccttagcttcatcttactcagtgtattagagtttggtcgggtcaggtctacgctggatgctgtagattttcttgtctataactcagataaacttgagtacacgcatgcctgaagttttggtgaacgcaatgtgtttgggttattaagtgtcatccgtaatggctctttcaaagctagcaaaagagcattaaatcatgtaaaccaaaagaaggagtgaaccttgactttgacttttctccatatccaatggttttgtttccttttatgtatttcttgatctacgcattggacaactggctatgtagaagtgacaattttcacacctctcgagtccctgaaacctagcctaatttgcttattacatatttgggacaatattttgaatgtctgtgactttgattttgtgattctgctatttaggcgatgccaaaattggcagtaacaatgtcaacacgatgaagaatgaagacttcggcatgaggggtttacgacgtgatgggaatgctgaagatgcctgggccacctcgcagaactcaaaatcgtatgggaaaagtatttccatagaaactgccaatctcagagaatatgctagatacgtactgaggactatctgccagcaggtacttatccaatttcaaatggcttctactttgaatatgtacctgattttggggaggcaactatccactattttttttattattgtatttaagtattcccccccttttttccccaataatttcaaatttgttaaagagctgtgataatggagacttttagtgtatcctttatacagattcactaattctggacattttgtatttttctcaacagttgacaagtagatggtagtatctgtcccatctctttttggttctctgctttacttctgaatacttacattctcatttcttgttacaaccaaagtttagttaataaaaatcataatctaaactttggtgcaataatcttttccccatctctaggggattttctgatttattctagtgttgttagagttgcataagggtctagagattaacttcaggtcattggagtcggggagagtttagagctgaaactatattatttaggtgaccactactgattgcacacatttgccctcttcaccagtaggtaatgttagctttgatgaaggcatctaaagattcaggatccactagagtgttagtatgctttgctctcagttaactagtaaccttcagaaagatgctctgagatgatgcaaatattctgatccttgttacacaccccattcctcataagaatcccttgtgattcttgtctaactcagtctttactatgacggctgcaaaatgttgtgtttttcttctgagttcctcttgttcctccacatgatcagtttatgctctacaaatactcttcttatgttgttgttcatttgtatttatttatttagttatctatgtggatatataacacattgcctatagcttctttaatgtccagctcgttcaagctgacatattaggaatccgtcatcctaccttttgttgtaattggaatatttctatccttttagggaactattgccttactttacccgtcccccatattccttgcctcatagttataatcagccattctgaggagtgccatttctgcctgtgaagagactggtactcagaaagcagagtctgagggctgagggatagatcaatggtgacatgcttgctgtgcttgcataaagcctagaatcgagatccctatattcatgtatgcactgggagcctgtggcagcccacctgtaatcccagaactcagaaatggagatacaggatcctagggtaagcaggctagagagaatgactaaataggtaagctctgagttcatctaagagatgctttcttggtgtataaggtggacaaggatctaagaagatacctgacatcaatgtctgtcctctacacacattcacacatgggcattatccatcatgttcagtatgtatgcacacatgcatacaggcacgcatgcacatgtgtatacacacatgcatacaggcacgcatgcacgcacacactaaaagaggaaagcaaggtctgggttataaatccccactgctatcgagtatcactgtttttgaactctcccagcagacagagctgtgcgtgcacatgtgtgagcctttgcatacatgtgcgtgtgtgagcatatgtgtacacatgcatgcatgtgtgtgattataaattcatattgatacttctagttctaatctaatattttaaagctgtatttttatatactctcgcttcatattagtaattacattcttgccttgtcccccatacagcagctagcatggtttcagagttgttatacatgcaccattaggaaaaggggctctgagagcactgagggttcatttatctgaagggtttacgataatgcattcaaacattatttggagaaacaggaagggaaaaataaagaaaaatgttttttacagttgtctcacttatggtgaacatattctttctttaaaattagaatcacttttatttactttgttttattttgtttgtttgttttgtctgttttgggtctcatctaatgtttgtatcatagcataccttcaaaagctctcataaaagtgcacacaataacctgtcctcacctgttgccttctccctatctggctctgctccgaagactagcttcagtatcttctgattatctttccatactttcagaaatcttttattttaaaaatgctgtatattacgtatttttgtagcgtgcattaagtgcacggttccttacatttgttttcactgtggtgtttaactgacattacagctattgatggccattgtggatcagtccccaactgtcagcacacagtggtgccactggactgtgtatggttctctagatgcctggaaccagatggagctggccaggtttagtgtcccaagaggctctgctgcaagccctatgggaagcctctggcctgccctacagtgccagtatccaataaacaaaaacaaaaacaaaaccaaaaaaacaaaaaaaaccccaaacaaaacaaaaacaaaaaacattaatcagtttgccagtaaataataatgtgatacctagaaaagcaacacactgcatctgggtgccttggtctgaggttgatttaatgcagctaatatagaacatgggattatgtaacttcagtaaatacccggagctgagcagctgacacagtgtaaagggagacttacttcatctgaaacagatttgggttcagattgagctctgatactgatagtttcttaatgccacttaataaaagaaaaaatgctaaagaaagatgttagtgtcaaaagaagtaaccttctaagtatttatacactttacctgtttagcagaatatatcacataagaattatgaaagttatataaagcatgaaattcttgtccctaaatattaagtcaaagcaaacaaataaacaaaaacctggttacaaaatagtaccttagagtaagtccttattttttaaaaatcccaaattttaactctgtcccacagatttaagtggtttctggtttaactcaagccctcccctccttggatttttttttaaagatgtcaggtgttataattttgttttgaaatttttccattagctggcaatgtggcttatttgataaagagtgcttgctgaacatgcagggagctctggtaggcaggaagacatggcattaaatttaggcctgttatcccaggactggacagagcagaaggatcagtagttcaaggttattcttgaccacatagtgacttagaggccgtcctgcaatacctgagaccttgtctcaaagaaaaatagaacaataacaaaagaaccagcatatatctacatgccagcttttctccacccatttttttcattaatttcatttcattagattgtctttactagccttttatcattttaccctgagaaatgagaataaaatcaacagccaggtagaatcattgtgtgccagtctaactgccggcttgtttttaggaatgggtgggagaacactgcttaaaagaaccagaacgactgtgtacagacaaagaactgatannnnnnnnnnnnnnnnnnnncccactcccccttttggccctggtgttcccctgtactggggcatataaagtttgcatgtccaatgggcctctctttccagtgatggccgactaggccatcttttgatacatatgcagctagagtcaagagctccggggtactggttagttcataatgttgttccgcctatagggttgcagatccctttagctccttggctactttctctagctcctccattgggagccctgtgatccatccattgttggaaagatcaggaattcaaggcccatacctaaacatgataaaagcaatttacagcaaaccagtagccaacatcaaagtaaatggagagaagctggaagcaatcccactaaaatcagggactagacaaggctgcccactttctcctgaccttgattttaattctgacttttgttttattctgtaattttctttacagtgacattgccactgctggctactcagtagatacagtcaatagcaaagggcatatattgtattttaagtcagtggtatatttacttgatacatagtatttatgatagctcaattttaaatgtgttatttaagagattcatcattttggagtgaggttggctaattggtaaatggattctgagagaagccatacttgtctgatttctacttcctggcttgttggtgaacgtattttgatgcttgaatctactttgttgtgcatgttcatttttatcaggcatgggattggaagtctttaaggcttgtgagtttccttgctgggtatgagtattaattactgtaaggctgtgttagcatacattcagtattcaaaatgtgacaattcttcgaattttctccagaatcttgagcagtggacgttgagacagtcctggctggagctccagctcatgatcaaacagtgcttgaaggaccctgtgagtatatattgacagcacacgtgtgaactgaatagaaaagcagaatgtcattggtgcttgaaaatcaagaagtgtgtagacaagttagctttctttttcctgatactagagctctggttctgtggccgaaatgaataatttgctggacaatatcgcaaaggcaacgatagaagtgttccagcaatctgcagacctaaataataatgcctccaattctggcatgagcctcttcaacccaaacactattggaagtgttgatccaagtagcacaagacagaatggaataaagacattcttaaggtatttatagttttgttgggctaccgttgatatttcatatgtcacaatagccttgattagcataattcattttttattaagcttcaggaaatgtaagggaaataataacttacaagtgacagtttctgttactcagccaggtaggagggaaaagtggggtgagtgatgtcttggcacgttacattttttgttgtaggtccaggtacctcagtgacacagatggacttaagtttgatgtgtggtatctctgtctttgggtcattcactaaacataacatactatctatgtgtctttaatgatagttttgtacaaatacagtaatttgtatttcatcatgaaagacagattggttttcatgtcatcattttggtaaaaggtaaatagggggttttagaatttaaagatcgcttattccttagcttgaacacaatcccattgcatatcatcaccatgactgaaacgtatagtgttcatagagagaacatatggtgtttcatggtcagaaaggcaggatccatgagtcactgaaaacagtttacaatgcaaaaaatgccttcccagaagagcaccttttactcctcagcagatgtgggtataaagcgtaagcaaatgcctggtctttagcaaaaggagaaagtgcagacatgaaatgagaactctagtctgtgccttgtgcaccggtgtttgactgtggcatctgcatcgtctgtgagagcagaggcagctgcgttctcgggtgtaacgcctgtttctgattttagttcctctgaacgcaggggtgtgtggctggtggcccccctcatcgccaggctgccaacatctgtgcagggaagagtgttgaaagccgctggggaagagctggagaaggggcagcacctgggttcctcttcaaagaaggaaagagataggcagaagcagaaaaggtacgctggcaggtgcctcgcgtcaaggctggcatccgaaggacccggaggaagcctagaagcctccatcaaagtcacatcgcagccagctccacggggtggggcttgtagaacggccaactctctgtttagcaaggatctgtatagggcaccaggtcccatccctgcctgtgtgtccaaatcactgcaaagctattgacgtacacaggcttgttgttaattctgacctgctagaccttgaaataattactgattttcattttcttaatttaggaaccttgttgtagatttttgattaaaactagccataacaactgccaaaactatttcattatttcatgcccaagaaatggtttcacatcattgtttttgaaaaacagatcatctcgtattgaggatgaatattcatactatacatttgaaacccaagaagttttaaagagaaaggtcataatttcttcattctataaacttaaagatagagctaataatactaccacaactgagtgttctttattggctacctacagggctcctgattcagacattctggcatagacctgttctttaggaaaattttcttttcactatatcaatcagtttgaccaatgttctctaatgggagatatcttgttaacgtgaacattgtaaatagaattttgccccctttctagcggaggccatgggcagtgtcggggcctggcacacggtgttcctagcaagtatcttgctttttggaggcctcagaccttgttgtgctcccccctaactttaccaacactctgctgttggcctttgagaaatatacaaccaagaaacacaggcctcggaaatagtcaaggtccacagagagccgcttcctaaggaagagttttctctgagcaatctctccggtattttttgtttgttctttgttttgtttttctctgcatacatttatattctttgtcctgtatatttaaaaacttccccctagtaacagaaagcaagctcatcacataccctgcacgtttctgttgctttgggatttccttccagagcaatagagaattgtcatttaaaagctttaccagtggtttttaatcttgccagtacaggaaggtgtcaccttcccaaatgttctctggtggtttcccaccctgtccttcatgtagtcgtaaataaacaagagcagtgagtgagtctactagaaagagcagctgttgcagcaggggcaagccattttttctgactagctctgttaatacttcctttgcagtatgtctcttttgagccagcagcctttcctctcattggtccttacctgccttaaggggcaagatgagcaacgggaaggccttctaacatctctgcagaatcaagtcaatcaggtaaagcgtggagtactaaactcggccagtatctttctgatggtattcattatttcccttttgtgatttcatgatagtgtcctaatgtgacattagattaatgttctgccgctgagatgctaagaaacacagtccatgtcccattctgcctagcatcatggtcaccagaaggccagcaaagctgatgctaattatgcattgagagatatgtaaagactataaaagtaagttgttgcacactgcttagcagctagcttaccgatctctgttgcgcctaccgagaagcaaggaatcaaggaaagatgtcagattggttttgtgagttggattatcctgacacaaagccaggtgaaccctgcccggtggcattaaatgagagctgataacatgcacaatggcaccaggcttactcggtttcctttgtcaccacacccacactttggacaggtcttttctctgtctagcttccagagggagccatttaaatacaaagcactcagggttctcttcatacctagactacaaatgccagggctgaactgatagagccactcctgattgggcatttgctgtctcttccagtgggtttatcctttccttcaagccgctctgggctgggccagtgtcctggtttaggtgcctgagcacttccttcttttgttgcctggaaggatccatgtcagatgttaagcagacctgctctgcctttctgcgagtctcagttcaccttgcctccctttgtccttgccataggcatttctgtgtggcctttttccgtgtgtgtgtgtgtgtgtgtgtgtgtgtgtgtgtgtgtgtgtgtgtatgtgtgtaagactttcttctcccagctacccaggaaattataaaataactgggattttgtctgtctggaagaagaggaagagtaaaaaaaaaaaataactttgttaatgtttaagctaagaagtgttagctgttactgtagagcttcattttaaacctgtaaaagtcgtcatagcaaagaacaaagggatttctgttgttactctttgttttttcccaatcttagattttaagtaactggagggaagaaagataccaagatgatacgaaagcccgccagatgatgcatgaggccctacagctccgcctgaatctggtaaggatgtggcagacccatttctgtcacacctctctctgtgtgaaagtaataccagctttcaacatctgtggacagaatctgcatgacagagggaagccttcctctttctcactctgtacctacttccttttctcttaaaccttctgtttccttagctgccgtccttcctgtctgggttgaattctagacagtagagttgtaagcacctatttgtgttttccaccagggagtagaggctccgtctggcagatctctcctcctcctcctgtgcagtgctaaggggaggtccgacaaacctttaataggagtgttggctttcactgtgttctattttacaaccacagaaatctgtcaactctcaatttttctcagagacattctgttaaattgatcagaaaaaaaaaagacaaatctcacaagaatattttacagaaatctgaaagtttcagcatgttttgtattcccttaaatttcctcttgacaaatcctgaacgtgccctgggcaattgcttttctggcttttggcaatctgacctccctgggcagttgttcacctcaccttcagcactctgacctcctcccaggagctggcagacctgtggcaataccttctcctcctcattccttccacgttaaagggcatctccagggatattatagtggcaggctcagatgcaataataatcgaatatcacacaattgcaggtgatgagacagagttttgatgctattcaggtttaactgcagttatgtctaaaactaagtaccatgagagactgatgagaagagaaaggtaattttgtgactgcccacattcaagtgttacactttctgttaagttttgaatgcctagcctctgtggaaagaaccataaacagtgataaccacatagctagaagagacagttgtaggataatccatagtgtggctagcaagaaccagttcttaacatcacttctggtttaacaaatcaacatttgggcacatatggtaataggggtagcaatacaaaatctttatcatattttgtatgctaggtaggaggaatgtttgacacggtacagcggagcacgcaggggaccaccgactgggccctcctactcctccagataattacttcgggaactgttgacatgcacactaacaagtatgttgggtttttgttttgttttattttgttttttatcattttatacctttttttttcccctgcatgcatgcatggtacaagcttttgtctactgacaggaaattctgccacttactgatttagctgtcattaaaaacttagcactttcagtagaaatgcttaggcaattctgtgtgtccgggttttgtttgtgagaataaaatggggttttctttcttctcagtgaattattcacaacggttcttgacatgctgggtgttttaatcaatggaaccctggcttctgacctatcaagtgcttcccccgggggatcagaagagaacaaacgtgcatacatgaacttagtaaagaaactgaaagtaagcttgtgatcagcctctactctgaaatcatgttgtttatggattattgtcttaatttcctcctcattaatctacatgtgtagctgattcagcagattgtggttatttgttatcttacctactctgtcagtccttcaaaattacaagcatgatatttgaacgatttttttctctgaaaaggtgtgctcaaataaaatgtgttttaatttttaaggattttaaaaatgcattatcagatatctaaccaaaactccagtgtcagatttcctttgaacccatgcttggatttacacatgcaagtgggaaaaaaaaaaatgagctctgcattgaatttgtaaatccactaacagtcctggacatgaacggcaaatagacattgcaaatacataatctgaagacgttacagtaaaaaagctgatggttaccttgcactgtgaccctggatacgggaaagtgtccgtgcggcagctcctgctgtgtgacagcaaatgacactggcgttttgtcatttcagcactctgatttgtcatggagaacaagactgcctttgtgtgcaccctgattttctacttgaatagaagaaatgaaacatttcaccagtccaatttgcagctgttccatagactgcgctaaggactaaagacatactagccctaaaaaaaaggaaatgtgtcactggggaacttccttcttgttagcttttgcttcattgtaaagtcagaatttttgcctcacttctctcttgcttttacatttttcccccctctttcttctagaaagaactaggagacaagaggtcagaaagcattgacaaagttcgacagttgctgcctttgccaaagcagacctgcgatgtcatcacgtgtgaacccatgggttctttgatcgatacaaagggaaacaaaattgctggatttgactctattgataaaaaacaggcaagagtaaatgttttttcccacatatataaatatatctagttatagaagccaagtgacttttcttaattttcagtggtataatttttgtcatcaaagcacaatagctattggcattgcaaaaagaaaaagaaaaaagccattatcttcaaagatctcccaattaaaatgcttatctggacttcagggcatttctagaatctaccaaaaacttaagtaacagcttagcataagaaataaaagtaaaataaaattattattttacatcaggataggaaacaagctatgtttatataagaaaatgtgtgctgataagaattttcatttgctgagtaagcagtatttagtaaaacttgtgttacaacactacgtagtctctaagaagcagtattagatgggcatttgctttctatacaacgctttggaaggttctttaaaataacagaaaggccagcctgagtagccattggcactgcagcaatggagatggtggagggaatccctgcccttagggggaagtagatgcacttttacatgcaacgggacgtgcaggtcaggtcatgatggcaccaacggggaacggtttaagtcacacaggcagaggtagtcagaacaggggtcctacaatagtggacacacagaccatcctgacggactaagtatacagaaaagtataggacaggtggggaaagtttaaggaaaggcaagaaaggtgactgttaagaggaaaaaccatgccaccagaattcagagttaactcaaatgccatagcagtgtggccatgggaggggaaaaccagaagtcacaataagggtgacttgggcttctttcagaaggcatccaggagccatttagatgtgagttctactcaggagaacgatttcatcacatggcagacagcagtgggtggtgacattactggtagtgtcagaagaagtcacacttaaagaggaagacagacaaaaacagatatgctcacatggggggcggggtaccttggccgttttgaggagaaatgtctttaaataggtatacttgcaaaattactaagaaatgttacccattagtattacaaataaaagcatgctatttttcagaaacaaaattgaattccttacctggattcagtaaagataccttggaattgaaagacttaatttgtgttgtacctgtttctgtaattaattttctcccaaaaaattttattcagagaaagccacatacatgtacatgaaatatatactaaattgagttcatacatcagaggcagactatatattgacttttaaatcttgtataatactaaaaataatggattcctgagatggttctaacagcaactttacaggatacttgagagattatattttctacaacatacttgaatgagaatgtcattttatactaaaatattttagctcacttttagatgccttaaggagtgtcaggtggtacagagcactggagaactgaacttgcaaagtcctgaaccccagttcacactgcttagatgaacattcctgtctactgagttcccttagctcgttccaaccttccaaccgcacgctttcaagcttgccctgtgggttggggacaggccaggttgtgttgtcacagaacattcttttcccacagggtctccaggtctctacgaagcagaaagtgtccccatgggacctgtttgagggtcagaagaacccagccccgctgtcctgggcctggttcggcactgtccgtgtggaccggaaggtgatcaagtatgaggagcagcagcacttccttctgtaccacacgcacaccatgcccaagccccgaagctactacctcgagccgctgcccctacctcctgaggaggaagaggaagaactcacgtctccagtttctcaggaaccagaaaggaaatcagctgagctgtcagatcaaggaaaagctacagctgatgaagagaagaagacaaagggaaggaagcgtaagacaaaatcgagctcacgcatcgatgtgagtggggggtgtaaggaaaagacggggtcatgggcacctagtgtgggatttacctacggccgaactctacacctagaaacattacaaagaatgctagcagctttcttacgtagagtttcctaacaagtgtctgtactaacgaatgaattctcataggtgacaggtagaaagcttttcatttcccactgaccacttttttggggggtgggggtaggggtttttggaggagatgtgggatttgtttctacataaccccagttgccctggaactgctttgtaaaccagcctggccccaactcagagatctgccagcttctgccacacctggttcactctatgcttttaacttcaaacttcagtaatgagtaatattattgagttaataagcttcataatttccccgggtttgaaacttttaaagaagaatatgattctactttcttaagcacctttattaataagtatgcctaaatattttattttgaacaattggtgtttgcagtgaattaacattttagagttccttctacttttctctgaatgaatttctatctgatttacccaaaaggagtgatcctaagatttcgttctttgccattgtatcaaataccccccctgttattctttaacctattttcagattttataaagagataaaataaacctagtgtaaaatcatctctcactcttcctctcactttttaaatacttgatatctactagataattcagaaattattttattgtatatgagatgcattatttaagatagctttcttatttgaaattatttgggtttcctttagagaaagtttcagaacattttctgtagaatgcaaggatgttcttgattggcagagaggaggcactccgcagagttcacgagcagttgtccttacatttacctgtgccaacactgaattgtgcttattcttggaggatagcttggtgattaatacttttagagatggctgctgtcactttcagaggccacttcagtactagtgccttctctcaaacctgggactccctggctctccaagccacatggctgagggtgacttttcacatgcaaaagccttacctaaatatatttacagtcctcctcctgaagttacctcttcctggtcagattacatctttttgtaaaatcaaaggatactgggaatttcattgtccttcatcctctagggccaagctagagaaaggatgggtgatgagggagttgagactttctggtatgatctttgggtctgtgctatgaggagaagaaggcacttggggaatggctattttaagtgctgctttgaaaattgtgggtaagatacgattgaggccttgatatgatagcactatggggttttcttactcagttcttatcctaacccatggtaaggccttccaagatgaggccagcaggagactgcagccgttgtcttctttcagttataggcattgttcagtgttagtattagataattcacttcgatattattatcatcatcatcatcaatgtctgctgtaaggaacatacttttttctttctttttttggtgattttggtggaaagatggtaacatagattgaagttagggccttatatgtgttaagtgaatattattgagctaagtactttttaaatcaaagaaaaaaattaatttgaatgagcatttttaaggaaatgggtcaccatttatattctctcccctttcatacaaaaatagccttgagttctgggacaggatcatctcacgtaactgaataagaagaacttatattgattaatcatgtgtggcatattcaagttaatttgtttcttaacgtttctgttgaaggagtatcaacagaccaacttataccgagtgcctcccaattactcccccatgtcctcccaaatgacgcatcatccgcaacctgcactgtggggttacaacctggtgagccagcctcagcagcctagctttttcctccagaatccgtctctgaatccaggtgggtatgagacaggtaacaccgagagaccattctgagcagcgacgtgaggttctccttgcttataacctttatcctctacaggatgggggtttctggtactcgattcacattttcataacccacaaccctaacaatttgtttttcttctccgagattagatgaggctgcagctagacccagtggcgtgcttctgttgtctcagctactacagtagaggagaataggacaggaaaatcactgagcgttggcaacatagcaagagcttgtctccttaaggaatgttcataagtagctgattacaggcatggattgtagaatttgtcagaaggagattgagctgcctaaagtctgagctactagacataaagttgataagtctcatgtttataaaacgtgtgtatgtttttattggctgtaattcccatgtgtgttttaaaagatcagacagtattgtagcttccctttcttacattgtaaactttaaaatggaatcatagagcagctcagaagtttggtttggcaaggagagtcacatactaacacacaaaactaccacatccatagtaattattcctgattatagtcgtgtttggttcaagccccaagtatatcttgtaatgcaaatgaatattttcctagatagaaatatttgctaattagaaattagtttaatgggaaaattttttaaaggatgaaaaaagtttaattttatgcacctgcagatatgtgcacatataactatgttcataacttttacctatatatacatacatgtgcttttacatgtaatggaaaatatgtttatagactttatgccatggctcacacagtaggcaggttcaggacatgagcttaccatctcctaggtccttgatgctttataagcagacaggttctcccatctacagaattcatcacctgcctccaaaggctctattctgatactactttcacattgatgtccaagatagcccaccagtctgttcaaagttgtaagatttaccctcctgctggtctgtgtttctctccccttctttctgttgtatagcatcagtagcttgaatggcttccttggtcacttgtcttcacactccagactgtaaactctatgaagatgggtacttttgctcttgtcttcacaatgatgtccttacaagttagaacagtgacccagtcttaaaaataaatattggtgatgcatgcctgtaggtattcaggaagctgaggcaggaagatcacctgagttcaggacttttgaggctgtataaaatgacagccggtgagtccttttatccacaagcacacacctggaagcagcaggtaacaacttaaacaagtactgggtccctgagagcaggtcagaagatttgccagtatattaagagggttagggttaagggtcccgggtttgaagtctaacatggaatactggtcaaaagactgaggaggaaaaagattcacgtaatggtgggaggcatttgccaggagcatcttcttcactgacacagcctgaagagacagagagcaattgcaatggttagattggtttatatcagctatcagcaagtctggggcttactaattctgcaagacctcctgggttggtgggatactgctcattttggaggagtttacaggcctcagttggttgctgggtagtgtctgctaagtggaaatcttcttagacagatatagactatggataggagataaagttaagaacgtagggggaaaatatttatgttgcttatacacttgaaacttccagacccatggtcctggacctatagtcagggtagtggtcagaagaagtctgaagaccctcctggggaaggaaagagcccaccctcagggataggtagcaggcaaaaatcttaagctgttgactgacaggagttcttatctagagttcattttgacctgttacaggtggaacccagtcaggaatccctgaagctcacataaaattattgaaaagttgcaaaaagagatgaaagtttaaaatatgttagtattatcactgtttgtgatctgtactgaaatcctctttgtagaaaaagcagcagctaacaagtatctataaacagctgcagtagactcatgcttttgagccatagcaagagcttgtgtacctagagggatggttttgggttaaaagcattgtcttagtcagggattctattcctgcacaaacatcatgaccaagaagcaagttggggaggaaagggtttattcagcttacacgtccatactgctgctcatcaccaaaggaagtcaggactggaactcaaacaggtcaggaagcaggagctgatgcagaggccatggagggatgttccttactggcttgcttctcctggcttgctcagcctgctctcttatagaaacaagactaccagcccagagatggtcccacccacaaggggcctttcccccttgatcactaattgagaaaatgccccacagctagatctcatgaaggcatttcctcaactgaagctcctttctctgtgataactccagctgtgtcaagttgacacaaaactagccagtacaagcatgaacactcatatcatagatagatagatagatagatagatagatagatagatagatagatagataatgacaaaagttttcagcacagtaggagatagtttttggtttctatttagaaaacaaaggaaccttaaattttgagcccttgactatgataacagtagccagtgctgtaccaaggctagattaatagtttatcagaattcctctgatcagttatgttaaactcagaacttttgaagtcttaacatcagataacatctttaagtcttgtgtttcacatgccttaaatcgcttcctcagacctcctcagcctgcatttatatatcttaaatcaggtccttagactttcacaacttagatttacatacctcagatcatttccttagacattcacatctttcacccatgtttctgaaatcacttcctagacccacacagcttgtatttacctatctcaaattacttccctggacccttacaatttacataaactttattcaatcatttaccatgcgacccagggggttgattactgagagcagtcattgaaaagcaagttcatttaaataagggaaaatcgtaaagagtagatttttagttagagatagtagtatgatatctggagtttgtttttacactgaagtttgttgtgggagtctcttttttactgtgtagcctgtaagagaggtaaaactgtcatgtgtctgcctttctcagcaggagacctagttgctctggtaaagcaagacctgatttttttacatctgaaacagattgaccagccagccagctgcagacttgcaggggggtggaactcactaaaaagtaggcttactgctgctaaactgatgaagctcaggctagccatcaacaccatcacaggtctgagaaggataaatttgagcacgaatataatctaagtggcctctgtattggttaaaatggcagagactaactggactgacagcctgaacttgtccatggtgatctctatgacttgcttggggtcaaaggtcaccaatttttgactatcacacaggacaacatcaagtcttcagctaccagacccagaatatttgagagattttcctatggaggacaagcctgggaaaactgacctgtcttggtgacgttgagtagagcagtcagccagctctgtccccaacttgggcagcatccaggtggcaagcaaggcatccgattgagcagctctttgcccagtagtcattattacttcgctccagttggagctccttgctaaccatcttctttggacacctacgcttgttctctgtgtacataaatatgaatgatttaagaagccgggtggtggtggtgcacgcctttaatcccagcacttgggaggcagaggcagacagatttctgagttcgaggccagcttggtctacaaagtgagtgccagggctatagagagaaactctgtcttgaaacaaacaaacaaacaaacaaaaaagaaaatagtgaatattaagtactaagtttaaagtaccactctgtagacggtaaaggtcacctagtagaaatgcacggaatgttttagacagatttgtaacaatttggttttttggttggctcaagtgcaaggttatagaagactttaagaaaagtaagtagggtgcagtctggtttccaggtttccttaaggaatgcactgtccttagcttagtactgtggattggtagtagcatttcatatctgctgcagtcaagttacctcgacatagttactcagttactatcattttcaaatgctcttcctatgcctgtgaatgactgatgctcatattgttaactgtggtgatgagtttgaaagatgcctcccaggcaagcagctataaaatacttctctgtcatacatattgctttagagtaagaaggaaggaaggtgggaagataggaaggaaggaaggaaggaaggaaacatcttttgagagatatgtgcgtagagtttttctccttagtatgtatcaaggaatagagacaatctctgagggaaggattgtcatttactataaagcctccaattatacaaatacgtttttctaattcataaaggccttaacaaattgtagatgcagaatctttaggattttttttttaagtctcttgagtaaccatgatcaaagccatgtttgtagattttgaagttttcgaacatttcaaatttccaaagtgttttcatttttgttttacaaaatagacattttctttatttttaatatattttaaagtaaaattacatgactttcccttacctttccttgttccaacccttgtctctcctcacttggtctctcccatgttccctccctcttattaccttctatcccatgtcacctccacttctcaactgatggcccttttctttgttctttgattattattgttccacagcacagatataagcgcagcattgctgagtccatcttcattgttcgtgtgtacatgatttcagggctgaccattttataacagataactagttaggcgtctcaatcctgagaatgagtccttctccctcccctccctctcacagccctgccttgcctctaattcttttttttttcctaatttatttttttaattaggtattttcttcatttatatttcaaatgctatcccaaaagtcccccagacccttgccccaccactcccctacccacccactcccacttcttggccctggcgttcccccttactggggcatataaagtttgcaagaccagggggcctctcttcccaatgatggccaactaggccatcttcttatacaaatgcagctagagacaggagctccagggatactggttagttcatgttgttccacctatagggttgcagacccctttagctccttgggtactttctctagctcctccattgggggccctgtgatccaaccaatagctgactgtgagcatccacttctgtgtttgctaggccccagcatagtctcacaagagacagctatatcagggttctttcagcaaaatcttgctagtgtatgcaacggtgtcagcatttggaggctgattatgggatggatccctgggtatggcagtctctagatggtccatcctttcatctcagctccaaactttctctctgtaactcctttcatgggtgttttgttcccaattctaagaaggggcaaagtgtccacactttggtcttcattcttcttgagttccatgtgttttgcaaattgtatcttgtatcttgggtattctaagtttctgggctaatatccacttatcagtgagtatatatcatgtgagttcttttgtgattgggttacctcactcaggtccatccatttggctaggaatttcataaattcattctttttaatagctgagtagtactccattgtgtagatgtaccacattttctgtatccattcctctgttgaggggcatctgggttctttccagcttctggctattataaataaggctgctatgaacatagtggagcatgtgtccttcttaccagttggggcatcttctggatatatgcccaggagaggtattgtgggatcctccggtagtactatgtccaattttctgaggaaccgccagactgatttctagagtggttgtacaagcttgcaatcacaccaacaatggaggagtgttcctctttctccacatccttgccagcatctgctgtcacctgaatttttgatcttagccattctgactggtgtggggtggaatctcagggttgttttgatttgcatatccctgatgattaaggatgttgaacattttttcaggtgcttctcagccattcggtattccttatatgaaaattctttttttagctctgagccccattttttaatggggttatttgattttctggagtccacctacttgagctctttgaatatattggatattagtctcctatctgatttaggactggtaaagatcctttcccaatctggaggaggcctttttgtcttattgcctctaattcttgtggatcccatgagatgctcccccatcatggttgttgaagttgtcattgttgggatcgtgtgtaggcagctcttttaggagatactatctcagatcagatttcctcatcctctgcctcttatgatccttcctctcttctgtgatgttccctgagccttaggtacaggagttgcattggagatgtatctgctggggctggcctcccccagtctgttaatgtcttgcattgtattcagtgatatttttctgtgatgtcactttttggtgtatggaaggcgtctttgatgaaggttaataaggactctcgtctgtgtgtataaggaaacgatttagaatgtagcaaggatgtataccggtctagtatgtcctcttctgagatccactgattgttggcttgattttgagaaccaggtgctatctctgttcttacaaccaacagctactgataaccaccaacatattaactccactcttgtacctttgcagttatcttggcatggtggtcactattgtggttaataggactttctggtgctatggaggttggaccacaggaagattacattcaggttgagtcctccgagtgctatgttctaaatcttcatctcttgagagataactagggccaattgcaatggcttatttggtttgaagtcattttgaatgccttttccaacaagttgagtggagattttcatacctggaattagggtatttgttagagtctgtggatcttgtggggagcattgtcagcctaactgacataatgtaagtgataagttatttctccactggtgaaatgagccagttcaagccagattagattatattaaatgcaggtttactgggaagctcctggacaggggtattcacaggccccaaggaaggaggccagggaattcttgaggagaggaaaggaggaagagagagaaagaaagagcatgcatgcagagagaaaaggagagaaaggtgagaccaaactgtctagattacacagggaagagcctctgggggaagggaaacccagcccttgggctggaaaattcattgttggtggtggggtatatgccaggtagggactccaggatgctgggagaacctggaggccaggtctgctttggcatgtaaaataagcacctcagtcccttgtcccggggtctgaaaacaaacattaagctctgtgtgtgtgtgtgtgtgtgtgtgtgtttgttgggtgtgtgtaaccgagaaggtacctgtgatatacatatcacaagtgtatgcatatatgtatatatgtatatatatatgtgtgtgtgtgtgtgtgtgtgtgtgtgtgtatgtgtgtgtacacatacacacaagaaagtattatatgtaattttaggtaaagattataagctaacatgattctttgagactttatcaaacagcctcagtgctatttgaccctccttcatcttccttctcccattagaggctctttcccattttctccatttccaaattaggccttttaattttgccacggtaaaggattaaataacacagcctttagatgtgtttataatacagatggatgctacgcctggcttatgaaacttaggaaagtacagtgtaaggcactgtttccttcaagtaatacgttcctgagtggtgtgcatggcttttgacccacatgaccggcgttttgtgctgacccattttgtttcaggcattgcatttgatccactgaagtgcagcccccatgtagcagttttgcagtattcacacacagcattgccttttatcttagggacattaggcagctctaagcaggatatcaatgcttggagctagtagggcagtatcttattttctgtcttgctcataaagtaagaaaggtgaaattcctgtgttgtcctggaagaatacctgctgcatttgaaagacttccttttggttgcttttctaggtggctcccgattggaccctgcgggctcctttgtcccaaccaataccaagcaagctttgtccaacatgctgcagagacgctcaggcgccatgctgcagccaccctcccttcatgcagtcacgtctcagcaacagctgctacagatgaagcttctgcagcagcaacagcagcagcagcagcagcagcagcagcagcagcagcggcttctcaggcaggcccagactcgacctttccaacaggtttgttcagaaccagccttggcatcctccttacatggtcctctcctctagctaggtgtggtgcataatcttgctatgtgcatatctctgtacatgtgttatacaggtttgcgaatattcttcctcttttgtagttcattattgatcttgggaagaagcccaaagtgctaaggactctcattcattcagatgtcggcctcttcctttgatgtgactctcccaacctccattctatattataattactacagtgttttgtatttattttatcactccttatatgcatatcctcacatgtatttctttgattttgtgcctctaatgtcatgatgtttttccccttcattgttttaagcattcattcaataaggtctgtatcaggcaacaagcaaattataaacagtggtccatatatggaattcgtatacgtgtgtcaaatgctggagatggtacccagaacctcatacgtgatgggtaaacactttacccatgagagatgtgcctactgcatgaatattgagggtagtttgtgcttgtttgcttaggtttgtttgttttgttttgttagtgttttgagacagggtctcagtatagagctttggctgacttggatcctactgtgcaaaccaggctggcttcagattcagagatctgcctgcctctgccttctgagtactgggaataagagaatgcctcaccgtgtgccctgcttttgggtttaattttttgattgatattctgatttctatgtcctgtaattcactgctctccctagacagtgtttgtatggtaaacacagtggccatgatgactggtgcctaccttgacatagacacatgaaacctgtagctctgtacaagtacagttgaggacaagactgtagtaggattgcagctgctttttctagtttctgaacattttctgtattttccagtctcgctgttgtgataatagaagccagcagagcatttactatgctgaaccagccatgcacactttaaatgcattagttctttagatcccacacaaccatgtaatgagtgcgtacctctgtgaccttaagtgcgtcagcccggctgcaggtgtcctgctctaagcaaaacaggaaactttacaataaccgggattctagggctcttgacttaccccactcctgcctttgcatcctggtgcctgtgtgactgagtatgtcttcattgctacctggcgacaggaagatgaggtgaagagaccccttatgcactcttaaaagttgtctttttaaaactgctctggaaacgtgaggatgttaagcagaggttatcatgggcttgtttttccctgactctgtcggctgcataaactccatgcatatcaggtaagatgagcagagtcgctctgtacacataactgatgagaagtggaataaaatgcttaaaaaaacataccaatttggcttaaataagcaagatgtttggagctgttaaaaccctctttgaggtttttagctgttctttcttggagagtaagcatacacacacttgttcttgcttcaaattcttttttattttaattatttatttttattttatgtgcactggtgttttgactgcatgtatgtctgtgtgagggtgtcagatcctcctgaacaggagctacagactgttgtgagctgccatgagggggctgggaattgaaccctggtcttctggaagaacagccagtgctcttaaccactgagccatctctccagcccatcttgcttcagatttgcttgctcttttagcacaaccccaaacttgtcttacttgcagcttactttcaaaccgtcactgctgaacttagctttgagttgccactgaaagtggttctgagctctggaggaaaggtcaggggcatacgggtaaccatggcaactaaggagtttaatgagacagagtcatcaaaggccttcctctcagcactcaaatagacctcagtgacttttgtctcctgcagagttgtgcagattaaatgcactggagctgatggcccatctgtgttttcgtactaattcttctaggccagtgctttggttttgttttgctttcttcttcatctcaattgttttatccttcatagtcctatatgtcttcatcagataatcagtttcatagcatcagcctgctcctcataattctcccccaactaaaaacagttttgaagttcccagagcttgcctaacagataataagctcttttatgtcactcttcttcatgtgctggctagtggaggaggatatgaactctactgcagatcaagcctaggccttggtgtaacagcgtaggcaagtgctttaccattgagctaaatctccaagccctctcagaagaaagaagaaggcatagttatgcagccatatgggcggggacccttcagagtaaacaaacaagatacacatggcatgatacacatggtgagctccccccccccccccgctctttataagtagttgtcttagtcactgttctcttgccatgaaggtacaccatgaccatagcagaggaagtgttaaactgaggcattcaggcagacagtgctggagaagaagccgagagttctatatctggaccttcaagcagtaggaagactgccactgggtgtggcttaggcttctgaaaccccaaaaccttacccccagtgacacacttattccaacaaaggtagacatactccaacaatccttcctaatctctctcaggtaccagcactccctaatgatgagttattcaaatataggagcctgtaggggccatttgtatttgaaccacccacagttatacttgttattaatataactggaatgtagacaaatatgctgtggtgggaaaaagaatctccttttggtaattacttgaaatcagtggtagaattgtgtgaaatataagtcatatgggtaacttggtagagtgtatcatgctggacacaataggcttttctaagcactaatcatttcatgacaaaataatagagatgttgattctaacttggaaggaatgctttctcaggttaaatgcccgtacacggagtcacacaagagctagtaatatttttggatttgtgtcccccagcaaacttttttcacttcttgaagataacaatatgaagatataatatgggactcctttataaacctctttggcaaggaatctattttttcctaggtgtagatatattgagatccttttatagctggtcttggaattttaccagacacttccaggctccactgtggctgtttctgctgccatgcttgttggcttatcttacagggttaggcattgggccttagtgtcccttttaccaccaccttacctactgaggacacatcggaagcctaggaagtgttaaataaatgcatacatgatctaaggagccattctcaggcatctacagcttcccaatagacttaccctcagctgtgtgactgccacccacacaatccagaagctatctgggtgcttctggaatgacctctgctgtggccattttgaagcctaaatgcacagaagagacagaagtttgaggtctgtaagtatctcagtccttacagagtgtctgcagcctctttccttccaacaaagagaatggtttatgcagaatcctgctgcttacctgatacaaggttaaaatagaataactttctagtccccctgtacatcagataggaacttcagtcagccatgtgattttctgttcaggcactaatcccaagattcaagagaaaagaaggaccaagaccacgattatacaaattaaagcaagatgtatttggctgcacttctgattggccatccagttgtctccccctcagtcagggttttcttttcttttttttttttttttttttttttttccattttttattaggtatttaactcatttacatttccaatgctataccaaaagtcccccatatccacccacccccacttccttgcccacccactccccctttttggccctggtattcccctgtactggggcatataaagtttgcaagtccaatgggcctctctttccagtgatggctgattaggccatcttttgatatatatgcagctagagtcaagagctccggggtactggttagctcataatgttgttccacctatagggttgcagatccctttagctccttggctactttctctagctcctccattgggagccctatgatccatccattagctgactgtgagcatccacttctgtgtttgctgggccccggcatagtctcacaagagacagctacatctgcgtcctttcaataaaatcttgctagtgtatgcaatggtgtcagcgtttggatgctgattatggggtggatccctggctatggcagtctctacatggtccatcctttcatctcagctccaaactccgtctctgtaactccttccatgggtgttttgttcccaaatctaaggaggggcatagtgtccacacttcagtcttcattctccttgagtttcatgtgtttagcaaattatatcttatatcttgggtatcctaggtttggggctaatatccacttatcagtgaatacatattgtgtgagtttctttgtgaatgtgttacctcactcaggatgatgccctccaggtccatccatttggctaggaatttcataaattcattctttttaatagctgagtagtactccattgtgtagatgtaccacattttctgtatcccttcctctgttgaggggcatctaggttctttccagcttctggctattataaataaggctgctatgaacatagtggagcatgtgtccttcttacctgttggggcatcttctggatatatgcccaggagaggtattgctggatcctccggtagtactatgtccagttttctgaggaaccgccagactgatttccagagtggttgtacaagcctgcactcccaccaacaatggaggagtgttcctctttctccacatcctcgccagcatctgctgtcacctgaatttttgatcttagccattctgactggtgtgaggtggaatctcagggttgttttgatttgcatttccctgatgattaaggatgttgaacattttttcaagtgcttctctgccattcggtattcctcaggtgagaattctttgttcagttctgagccccattttttaatgggggttatttgattttctgaagtccaccttcttgagttctttatatatgttggatattagtcccctatctgatttaggataggtaaagatcctttcccaatctgttggtggtctttttgtcttattgacggtgtcttttgccttgcagaaactttggagtttcattaggtcccatttgtcgattctcgatcttacagcacaagccattgctgttctgttcaggaatttttcccctgtgcccatatcttcaaggcttttccccactttctcctctataagtttcagtgtctctggttttatgtgaagttccttgatccacttagatttgaccttagtacaaggagataagtatggatcgattcgcattcttctacatgataacaaccagttgtgccagcaccaattgttgaaaatgctgtctttcttccactggatggttttagctcccttgtcgaagatcaagtgaccataggtgtgtgggttcatttctggatcttcaattctattccattggtctacttgtctgtctctataccagtaccatgcagtttttatcacaattgctctgtagtaaagctttaggtctggcatggtgattccgccagaagttcttttatccttgagaagactttttgctatcctaggttttttgttattccaaacaaatttgcaaattgctccttccaattcgttgaagaattgagttggaattttgatggggattgcattgaatctgtagattgcttttggcaagatagccatttttacaatgttgatcctgccaatccatgagcatgggagatctttccatcttctgagatcttctttaatttctttcttcagagatttgaagtttttatcatacagatctttcacctccttagttagaatcacgccaagatattttatattatttgtgactattgagaagggtgttgtttccctaatttctttctcagcctgtttattctttgtatagagaaaggccattgacttgtttgagtttattttatatccagctacttcaccgaagctgtttatcaggtttaggagttctctggtagaatttttagggtcacttatatatactatcatatcatctgcaaaaagtgatattttgacttcctcttttccaatttgtatccccttgatctccttttgttgtcgaattgctctggctaatacttcaagtactatgttgaaaaggtagggagaaagtgggcagccttgtctagtccctgattttagtgggattgcttccagcttctctccatttactttgatgttggctactggtttgctgtagattgcttttatcatgtttaggtatgggccttgaattcctgatctttccaaaacttttatcatgaatgggtgttggatcttgtcaaatgctttttctgcatctaacgagatgatcatgtnnnnnnnnnnnnnnnnnnnnnnnnnnnnnnnnnnnnnnnnnnnnnnnnnnnnnnnnnnnnnnnnnnnnnnnnnnnnnnnnnnnnnnnnnnnnnnnnnnnnnnnnnnnnnnnnnnnnnnnnnnnnnnnnnnnnnnnnnnnnnnnnnnnnnnnnnnnnnnnnnnnnnnnnnnnnnnnnnnnnnnnnnnnnnnnnnnnnnnnnnnnnnnnnnnnnnnnnnnnnnnnnnnnnnnnnnnnnnnnnnnnnnnnnnnnnnnnnnnnnnnnnnnnnnnnnnnnnnnnnnnnnnnnnnnnnnnnnnnnnnnnnnnnnnnnnnnnnnnnnnnnnnnnnnnnnnnnnnnnnnnnnnnnnnnnnnnnnnnnnnnnnnnnnnnnnnnnnnnnnnnnnnnnnnnnnnnnnnnnnnnnnnnnnnnnnnnnnnnnnnnnnnnnnnnnnnnnnnnnnnnnnnnnnnnnnnnnnnnnnnnnnnnnnnnnnnnnnnnnnnnnnnnnnnnnnnnnnnnnnnnnnnnnnnnnnnnnnnnnnnnnnnnnnnnnnnnnnnnnnnnnnnnnnnnnnnnnnnnnnnnnnnnnnnnnnnnnnnnnnnnnnnnnnnnnnnnnnnnnnnnnnnnnnnnnnnnnnnnnnnnnnnnnnnnnnnnnnnnnnnnnnnnnnnnnnnnnnnnnnnnnnnnnnnnnnnnnnnnnnnnnnnnnnnnnnnnnnnnnnnnnnnnnnnnnnnnnnnnnnnnnnnnnnnnnnnnnnnnnnnnnnnnnnnnnnnnnnnnnnnnnnnnnnnnnnnnnnnnnnnnnnnnnnnnnnnnnnnnnnnnnnnnnnnnnnnnnnnnnnnnnnnnnnnnnnnnnnnnnnnnnnnnnnnnnnnnnnnnnnnnnnnnnnnnntatttttgtatctattgaggcctgttttgtgaccaattatatggtcaattttggagaaggtcccgtgaggtgctgagaagaaggtatatccttttgttttaggataaaatgttctgtagatatctgtcaggtccatttgtttcataacttctgttagtttcactgtgtccctgtttagtttctgtttccacgatctgtcctttgaagaaagtggtgtgttgaagtctcccactactattgtgtgaggtgcaatgtatgctttgagctttactaaagtgtctctaatgaatgtggctgcccttgcatttggagcgtagatattcagaattgagagttcctcttggaggattttacctttgatgagtatgaagtgtccctccttgtcttttttgataactttgggttggaagtcgattttatccgatattaaaatggctactccagcttgtttcttcagtccatttgcttggaaaattgttttccagcctttcactctgaggtagtgtctgtctttttccctgagatgggtttcctgtaagcagcagaatgttgggtcctgtttgtgtagccagtctgttagtctatgtctttttattggggaattcagtccattgatattaagagatattaaggaaaagtaattgttgctcccttttatttttgttgttagagttggcattctgttcttgtggctgtcttctttttggtttgttgaatgattactttcttggttgttctagggcgtgatttccgtccttgtattgcttcttttctgttattatcctttgaagggctggattcgtggaaagatattgtgtgaacttggttttgtcgtggaatactttggtttctccatctatggtaattgagagtttggccgggtatagtagcctgggctggcatttgtgttctcttagtgtctgtataacatctgtccaggctcttctggctttcatagtctctggtgaaaagtctggtgtaattctgataggccttcctttatatgttacttgacctttctcccttactgcttttaatattctatctttatttagtgcatttgttattctgattattatgtgtcgggaggaatttcttttctggtccagtctatttggagttctgtatgcttcttgtatgatcatgggcatctctttttttatgtttgggaagttttcttctattattttgttgaagatattagctggccctttaagttgaaaatcttcattctcatcaattcctattatccgtaggtttggtcttctcattgtgtcctggattacctggatgttttgagttaggatccttttgcattttgtattttctttgactgttgtgtcgatgttctctatggaatcttctgcacctgagattctctcttccatttcttgtattctgttgctgatgctcgcatctatggttccagatctctttcctagggtttctatctccagcgttgcctcgctttgggttttctttattgtgtctacttccccttttagttctagtatggttttgttcatttccatcacctgtttggctgtgttttcctgcttttctttaagagcctgtaactctttagcagtgctctcctgtaaatctttaagtgacttatgaaagtccttcttgatgtcctctatcatcatcatgagaaatgtttttaaatctgggtctagattttcggttgtgttggggtgcccaggactaggtggggtgggggagtgctgcgttctgatgatggtgagtagtcttgatttctgttagtaggattcttacgtttgcctttcgccatctggtaatctctgaagctagctgttttagttgtcactgttaagagcttgttcttcaggtgactctgttagcctctatgagcagacctggggggtagcactctccttagtttcagtgggcagagtattctctgcaggcaagctctcttcttgcaaggcaggtacccagatatctggtgttcgaaccagactcctggcagaagttgtgttccactcactagaggtcttaggatcacgtgtggaatcctgtgtgggcccttgcgggtgtcaggcgactcagctggcaaggtagccggggctcgagtggagtggaaggggtttgtgccccagatcaagcccgggtagcctgcttccctatgtaccgcagtctcaagttccacgcgattggattggggtaggcgctgtgttccactcaccagaggtcttagggtcccgtggggagtcccgtgtgggcccttgcgggtgttgggcaagactctgctgtcaaggtagcccggggctcgagtctcgagtcgagcggaagggacttgtgccccagatcaggcccgggtagcctgcttccctatgtaccgcagtctcaagttccgcgcgattggattggggcaggcactgtgatccactcaccagaggtcttagggtcccgtggggagtcctgtgtggacccttgcgggtgttgggcaagactctgctggcaaggtagcctggggctcgagtctcgagtcgagcggaagggacttgtgtcccagatcaggcccgggtagcctgcttccctatgtaccgcagtctcaagttccgcgcgattggattggggcaggcactgtgatccactcaccagaggtcttagggtcctgtggggagtcccgtgtggacccttgcgggtgttgggcaagactctgctggcaaggtagcccggggctcgagtctcgagtcgagcggaagggacttgtgccccagatcaggcccgggtagcctgcttccctatgtaccgcagtctcgagttccgcccgattggattggggcaggcactgtgatccactcaccagaggtcttagggtcccgtggggagtcccgtgtggacccttgcgggtgttgggtaagactctgctggcaaggtagcccggggctcgagtctcgagtagagcggaagggacttgtgccccagatcaggcccgggtagcctgcttccctatgtatcgcagtctcgggttccgcgcgattggattggggcaggctctgtgatccactcaccagaggtcttagggtcccgtggggagtcctgtgcggacccttgcgggtgttgggcaagactctgctggcaaggtagcccggggctcgagtcacgactcagtcagggttttcaagagcagccctccactggcctcttggagttcttcttataagatgttcacaggtggcagaagggtcggtggttattcactgttacaaggatgcaatgaaaaggaagaaacaaagtaaatgggggcttgcaagtagccacaaaggcaaaaatagacatcagtgaatggggataagtggcagtctatgtcagaccagaaacttactcttgattacaagtagaaacctcagctagccagggactcaacacaagacaaacagctttacctcttagctagatttgaacactaagcaaactgtttcagctgtaaacagaactcttatcccctaagatatgttctctgttttggtctgacatccacctttgagggatttgttctgtcacaaagacaaccttttatttctttgcgaatgtctgaagatgctgtcttggtatctaactacttgatgagatgcttatagttataactgagtgtcccttacagcaatcgcccctgttgacatgaacaaagatggtttggcaaaggaacctcttttcattccttcccgtttctgactttattgagaaagtgattggcctctgttattgcctgtacactgacaactaataatggatcactcacttttataatcgcaaagagatgttgacagaaaatagagatgcctgaccattgtaagcattataagaattggtaagcaaatttagttataaccgtggaggtaggtagttgaagaaaggaaggaaggcagaatcagagccttccagaactggtaaatgcttgagaaaagtccatctgatttcacacatacacaggttgtggatagctgtggccattccagttgtacaccaacccatgactcaatgattgatctcataacttaggcataggtttttatcattttggaatctcttgtctttgctttttctctctcccatgctctcttcagttgtgtcagttgtgtatttaaagaatacagaccccccccccccaaaaaaaaaggaccctgctctttcctcgtgtttatttattaaataactttgttccgccatcatgactttttcttatgcttattttgttgaagagtaagctttttagacatgactggagatcttgtatttcttgtcatctccttccctttcattaaggggcaatcactaccatgaaagcttggtgctcttactgcatagcttgacgccatcaaagtgattattgtcctgaattactctacagatcgatggagtatataaataatggcacacatgtattttactgctctgtaatttattatttttgttgctgatttctgaactgccttacatttttcctgatataaaatttaggcatttttaaattggtttgtcattcctgttttctgttggataactgtccagaaatcatgaactgagcatagtttaaatgatagtcttttgttaaagttagacaaaagagtcttcctaaagaattctttaattttaatattttcactaagtgtcacttaggaacataacagtacagtcatgaactcaggaagaggaaacaactgactcagtacggaatatgtaaatccttccatgatgtcctttggtagaaggcatgtacatggaatttggttttaattattagtatattgtgtttctactgaatggtaacattggcataaaacagttgatctgtgccaagatctcgcctagaggaaaatgaacatagcatatttgttaatgggaaaagatatggatattgtgcaaagaaataaaacactgttatgaaggtggctgttggaaccaagcaaatatagtgatgtatgcactggcacctaaaattgatcatttttgctgggaaattcctctcatacatccctatctctaggaaagccaagctctggtgttctttcttgtgtctgtctctagaacgtgggatgcttgtagaagcttgcctgtcttcgtcatcactgtctcctggaacacaggtctaaaatgattaaggaaggaaattcacctgagagttagttgcctatttctcaattctattctgtcagtctgcaaacagtgatggtactgtaaattcatatttgttgtttacggtggctggctgaatacatgatcagcctcatactgtacttcctgggcttggaactaattgattacatccagtaagctatggcctgctgactggtttatttcctatcttctctgtttaatgttacccagatggtctgagctctgctactggctctaggctggccccagttgtttgcagtgagtggggctcccggatcatttagtcacagcaaacgtctcgatctgataagccccatttaactctcaggatatatcattttatgacaaaatatccccatattgtttatcggtgccccaatcatttggcataaattaatgaaaaatttgtagggctcgagttttgacttcctaaagaactttttttttttttaaagtgattcttttcatgtggagcttgactacatgtataacaggatttagaatctcatctatactttctgccattttcttgctgttcctgttctgtaggacttctgtaattgtttcttcctttccggaagactttgacagcatagaggcaataccttctatctgttccttttcttcattcttttataccgttaccttttagatggcaaaataaaaagcaggctttatgcctataatagttaataactgtagtcttcattccattagtagtcagtttgtgtttgagtgcactgaccatgcccagtttagtgagatttctttctgagactttacccttagatgacctcatgatctttaccatgcatttgtatggtatagaaatcctaagccctcacaggtacatagatagtaggtgtaactccaccccaaccctagttctgaatctttctattcttgagttcttgcttctccctgtggtgattcacattgttcatagagggatgtgtggcttgatttgtcagctgatgctagagagtggacctgtggtttacaataaccctgttatcacttccactcagtacctgtctccagattcctaacacaatgcagcacctctgttttctttccaggatggagaatatattttattattttggtttggtttctgagcataggttttgagagtacatgttataagacctcatctcttttgctttacctggagtatccaagaatggatgttctccactaaattactattaggtttctgtatcaggtagccagcctacactataagtccactaatgttagagagaatcaatacatgtgtgtgtaagtcaacttgtttcatggctttttggtggtaatattttatactactgcaacacctttatttgcatattccaacttcaaaaatatttgggttattacaagcttgctgcgtaagaagtttctctaataagttgttttggtaaagaagactttggcagtgtttctgagctcttaatttttctggaagttttgtgcttatgaggaatcagacatgtaaagattttattcattaaaagcttgaagtaaacattatgattgtcatgttgctaatgttgtatgaaagaaaataattggcatggatcattttccaatcattcagctcaattttgggggcgggggagatattacaacaaacaaaatattttaacatcaaaagagattctttgctttttatattcacttaaacaaatagaaatttttatattttctctcctcttgttttttattactttcctattttacgaatttgatgactatattcaaatgcttatgtccacattgtccaggcatgttgatagactatgttgtagacagggtgcatatttgtggtttgtttactttggaatgaatcaggcagttttagcagttagtgctggcatcaactgacgttagtcaattgcaagggaaggctttctaaaacagtacatgtgtgtaatttgtcactaggaccttgtagtgtttttttgggtctattttctgtggtcaatacagataagccttctatgatgatcataacttttgcatattattacagccatagattcttagaaacttccaaatgagtcctaagtataactatttttgctatgaagttcattgcaatactgatttatgttacagctattagtagtaacagtggtagtagtgtcagaaaatgctttttattatgacaaaatatgtgtaagatgacattttggcacttgaattatttcagttttttccttctttttctttcattgaaaatagattttttttcacacgatgtattctgattatggtttcccttcccctgctcctccatgactcttctgctcccctcctacctgaatctacaccctttccatttctttttaggaaacaaacaaaccagaacaggacaaaataacaaacagacaaaagccaaagaaaaagcacaagaaatacacacctctgtatacccagcaatccccttaaaacaaaaaacctggaaaccataacatatacacaaagcacttgtaaagattttttctatttttttttatttttttaaagatttatttattttattatatgtaagaacagtgtagctatctttagacactacagaagaaggtgtcagatctcattacggatggttgtatgctgggatttgaactcaggacctttggaagagtagttagtgctcttaaccgctgagtgatctctccagccccaaggttgtttttttttttttaattagatattttctttatttacatttcaaatgttatcccctttcctggtttcccctccaaaaccccctattctatccccctctccctgctcaccaacctacacactcctgtttcccagttcggcaattctcttacactggggcatcgagccttcacaagaccaatggcttctcttcccgttgatgtccgacaagacaattctctgctacatgtgtgtctggagccatgggttcctccatgtgtactctttggttggtggtttagtccctgggagctctgggagtactggttggttcatattgttgttcttcctatggggttgcaaaccccttcagctccttgggtcctttttctagctcctccattggggaccctgtgctcagtccaatggttggctgcaagcatccacctttatatttgtcagacactaacagagcctctcaggagacagctatatcagactcctgtcagcaagcacttgttggcatccacaatagtatctgggtttggtaactatatatgggatggatccccaggtagggtagtcttcaatggcctttccttcagtctctgcaccacactttatctttgtatttgcttccgtaagtattttgtttctctttctaagaaggaccaaagcatgcacactttggtctttctttttcatcttcatatggtctgtgaattgtatcttggatattccgagcttttgggttaatatccacttatcagtgagtgtataccatgtgtgttcttttgtgactgggttatctcactcaggatgatattttctagttctgtacatttgcctaagaatttcattaattcattgtttttaatagctgagtagtattccattttgtaaatgtaccacattttctgtatccattcccctgttgaagaacatctgggttctttccagtttctagctattataaataaggatgctacgaacatagtggagaatgtatccttgttatatattggagaatcttttgggtatatgcccaggagtagtataacagggtcctcaggtaatactaggtccaattttctgaggaactgccagactgatttccagagtggttgtaccagcttgcaatcccatcaacaaatagtgctggttcaactgaaggtcagcatgtagaagaatgcaaattaatccattcttatctccttgtacaaagctcaagtccaagtggatcaagaacctccacataaaactcagatacactgagtctagtaaaagagaaagtgaagatgagcctcgaacacatgggcacaggggaaaagttcctgaacagaacaccagtggctaatgctctaagatcaatagtagacaaatgggccctcataaaattgcaaagcttttgtaaggcaaaggacactgtcaataggacaaaaaggcaaccaacagattgggaaaagatctttaccagtcctatatatgatagagggctaatatccaatatataaaaagaactcaagaagttagactctaaagaatcaaataaccatatttaaaaatggggtacagagctaagcagaaaattttcaactgaggaatatggaaaggccaagaagcacctaaagaaatgttcaacattcttagtcatcagggaaatgcaaatcaaaacaaccctgagattccacctcacaccagtcagaatggctaacatcaaaaattcaggtgacagcagatgctagagagatgtggagaagggggaacactcctccattgttggaagtatcttgtggctttgtagcagcccaggattgacagatgtttcattcttactgtgattggtgttggcattctcctacggaaactgaacatttatcccttttctttgttagaaatatatttagcttttccaaggcactctaaaacgatttcgtgcaactatgatctagccctttttaattgtgagactgtagtaaaataattacacgttgaatttatttcaccctgttaatgaagtcctggggaaatgcaggcatgctgagatcctcggctttccccctctgtgattatcactccaggctttcataaaataaccatgtaagtagtacatgaagcttatgtattgctatcattttgatttatgttctgaaggccaaagtgtattaaattgaggctagtaaaaagatattaactgggtctactctacatgtagttgtttagaactatatttgctattagaaattttattgaatacacctcattatagagtcttagaaggtattaaaatttcctcagaaaacagtatgcatggttttcagatcactatgataaagcttcattaagaagccatggaaattttgcatgtggtgagaatatgccatgtgtctttttctccttatgcacagatgctgggtagtgcctgtgactggagagccacaattaagggactcctcagtacccagagaagcatgtgtgccctcctagagagtcacttaagaaactctttgctgagaggggttaggcgtaaatttatgtgtgttactggtgatgacatgaagctgtgctcaccaaacagtctgaaacctgtaagttctgtattcagaagctcaactcaagcactttcagttacagagtctgtcctgattttgttttccagggccagccaggggaccaggctgctctctttactgcacaagcacggccctcccctcagctccctcagtatccagggctgcaacaagcacaggtacccacactgctttgaagcaaaggattccttgatgtttaatgctatttctttggagtaggagatcaaggaaactgcttctcaactagatagagaacttagttatttctgctcccatgatttcagaacagtagttgttgagtcagtcccaggattgatcaggaaactcttagattagaaatggaaattaattcaggcttctcctctgccgctgataatgtgttgaagcacttgatctaaggtggtggcgagcacctgtaacatccacccaagaggcagaggcaggagcattaaggccatctaaggttagatagttgagactgcatctcaaaatcaatcaatcaatcaatcaatcaatcaatcaatttattaaattgtttagtaatctcagttatttatgatacagtgtttaatgatataatttgttatagaaattttcatattcaaggataacttccatgagggatcatggtagaagaacaggacaataggcctttgagtcaggttgcagtacaggtgttgttgactctgtagctgtgtgacatgcatggtattctgaggtctagcttccttttctgtaagatcaagaggaaagatgtgggattcaaggcaacctatggaattagcgtactgtcacatacacagtaaatgctcaacaaagggtgtgcttatctttaaaaaatgtagatctttgtcaggcactagtgttgcatagaattaatgccagcacttgggaggcagaggcaggtggatctctatgagttcaagaccagcctggtctacagaacgagttccaggatatccaaggctacatagagataccctgtttgaaataaaataaaataaatagccctttattccccctttgtccaaactgtttagtagttttattatttctgcatccttacacccttacttctttcttttatataaaaagacccgatactttgataagatttgtgttggggctggctattcattccatgtatatggccgaaaggagtgccctgtttgtcttacgtaagtcccgagtctgggttcctgtaggccacttctgccatttagtgtgtatcactcttgtctccagagtcagagttcttacactgctttaatatgtggtgttttggggatccagagaacaggcagcattttgttcagagaattgttatcttgtgatccagaaaactccatgtttgtcttttacataaggcatcaaggtttagagaaataggttcttgtacgaatgggaaagtataccccgtcagttgatgttcactgggcacggcccctcccttgcttgtcccactttggagatgattctgatattgtttcgattttgttgaatctaggcatggagtgtgtggatacttcgctgattatttctatgcagaatgctgcccttcctagcccatgaaatagacagctcaacttagaaagcaaatgaatatccaattattttgaactagagacttctgtggattcattatccagccagtctattctctaagtgtctggttagacttctcgcctgcaagagtagccatcctcatatgttgagtcatcccagccttgtgagagcagtgagtttcaggttggacctcctgggcttatttttgccccgtgtttcttagtgatgggaatatgggtgctaactggagcactgacattttcctttgtgccttcctgcagaccatgccccagggctacacaatgtatggaacacagatgcctttgcaacaggcagctcagcagcagcctggtggcgtggtcctttcccccagctacaactccagggcctatccggctgcacattccagcccagcgctgatggaaagactccggcagcttcagcagcagccaagtggctacgtgcagcagcaggcctccccgtacctgcagcccgtagctggctctcagaggtgatacctgttgaagtaattgcgatagtaaaaccctctcggccttgggattgttaagctcgctccttccaagcgtttgataccgtaatggtttttgagctcctctacttgagtcctgacatctcattttttttttaaccagcgtgcagtagaggttccaaattctttcattgaagaatgctgtggttttgactcacttcttccatgtgtgctatgtaaagtttttcagatgttacccatgtgttttcttttctgcttttttcctccccaaaaggattttttttttttattaaaagtatctgagaaaactatcgatcatggttagcagcgccttactaggatttgttgatcaagccagtttctgttgtagagctaattgtacatggtgctttgcaaagttttgttatgacttagtttttatttttcccacctcagagatgactcatggccgactcttctggttcttgttttaatcacaccccttcctcctagggtgtgtcagtactgcttattgtcgtagtcgctatccatacatggctaaatttaaatgaattaaatctgatttaacatttatttctgcagacacattagtcaccttttaagtgcactttagccagctctggccagcatggctagatttgaggttcatgtgacatatgcagtgacgtgaagacctggcaggatgctcagctatcttgtgaaattctgtagctttgaccaaggagccttgcagttttgtttatttctaaaccctgataactaactagtcctagtggctagaggccatttcattggatggcacagataggaatcattattgcttatcaaaatatacaatctcattagataatatagtccagaagaattaggtttgtaatcatatagactacattgtacagtggatagcagcttagctcccatgcgttaccatcaatgaccagctacatgtctgctgaggataataactctctgaaagttagggaggtcggtgggatttgtgggaaataatttgtaaaacatgcattttgctcaccatgttttataagtagtagcagagcagagctcagtaacttgagcttaagtgctaaaaaaaaaaaatctgggttcaaatcccacctgtgtcattttttttttctggatgaccttagttatttctctatgtccactgcttcatttttaaagttagagaataaaactgctaactcacagtgatactcgagaagtaatgaaatacgactgttcagccattctactcccagtcttccagaagtaaatattaaattattttcacttactgctaacagcgaatttgatttttttttttaaagtaatttctatatgattgctacttggctcaaagtagtatgtttaccatctttttttctcgttgggtcacatttgttatctgaccctctggccttttcccgttttaattgtacacatgattattgaacacggattgtttcttggtggatgtgtgtaaaatgctggaggcgctgactgactttcgtggtacgcctggttcctgaacacaagttgcattattctttgccagactgaaccaccaggctctacagcagagccctctggtgggcgggggaattgacgctgtgctgactcccgcacatcccaacctcccctcggtgcccctgcctcaggacccaatgaggcccagacagcagcaagttcgacagcagcagagactcctccaggtatggggtagggaggtgagggcgatgccatcccttccggtagtgcagatgcatttcgagtgaagcgttaacttccaaagcgccctatgtatttcacactaagcggcttggcgagtacactgtagttctccatctagagagagttttcttttctctgtatctgccaggccatgggcaggagactgcattgcgcaggcagaaccattccctttcccagagcttcaagggggcacatggatgccttagtttaaatgtgagcctcagcttacctggttgctaattgcctaagagcctacaatttgcatataaaatttaatattcataaggaacaaattagacaggaacaaaagcagcttgcagtcatctctttgattctcatagcattgtgatttctatcacacttcttctctacttaaactgtggagatggagaagcagagattacacaatttggagggctctgtgttggaatccagaaagctaccgtgtgttcatttgatataaatacttaagacttctaggtagacagaagtctcgagggtttctcgctttagcacattcgtgtttctgatttctttattttccagtattattgtggatgggggatataagtcattggtaaagcaccttcccagaatgcacatggccctgggctaatccccagcactggaatgaaggaagaagcagaggcaggcaggcaggcaggcaggcaatcgtgttaaatctgtgctatttttcttcactattcacaagtgatggatacttcttggtaagattgttaagagaactctcattgccagccaaaaatgaggtgcaactttatctacccgcacagaaacacagggaaatgtggaatctagtggagcagggtaggcacaagagaactatttatgctctatgaggtgacaggcaagaaagcagggatgcagaaaggaccttaagggagatgtgtctcaacttttacactggatggagagaaggaaaaaaaaaatagttcccctaagaatctaaaccgtaaatatgcccaagtgatgacgtctggatctagtgtgatctacaaaattatagttgagaggatccaaggaagcaagaagtgaagaccagccctctatagaacagagcttcagtttataaggtgaccattagtacatcctcattttggataaagtattttaaaagtcatgatacattattgataatacatggtaactgatttgggtgactatagcctattgaagtcctactcgttgtatagaggccattgccaaggtggtaaagaaaaaaatctactcttgaacttgtcatcaataaaatggaaaagatgatagagccgctttctaactgtgcattggataaaccaacaattcagttcaagacagttcaagcaaagcactaatttgatgttatttctaataatttttagtaacataactactaaaacagagactgttatgttctttaacctctgtcctacaagtttgcaaatattttttcagggcaactatttgaatggctctgttttaagatttgttatttctaaattaccaaggaaccatgctttgttgcttacttatcactttctgccttcccagggcattttcaaggttgcaaatagatcattttctccactaggtagcctgttcctttcccccctgttagcctgagccctgatactgtttcttatcagcaacaaagaaaggaagtgtgattcgtccgtttgtctaaagtacatttattcttctttttatgattggcttttggcataaaggaaaatgtcagcagttgagaagttgagttcatctctcttgagagattgtgcagagaaccaagtgaatggtagtttcatattgcagtgcttctggttcagccaacactgttcgtgttgacacacatctgcaccactgctgggactccagatcgcacgtattgcagatctcaaagtacatagttattgttttcactttaaaaggtcaagtaatttggggaatagtatatagacaaagttgggaaaatacatatgatgaaaatctagtcgggtcaccagtaactaaaggccactgagagaatatatatacatacatttatttacctacacagaaatataaaatatatatatatgtatatatatgcatgcatgcatatgtatatgcattctgtttcttctgtgacttagaagtgttttccaagagctatggatttgagccaatttggtgtagacaggcttctgtgttttatgctggtaatttattgcacactttctatggggtagtttatatcctttatataataaaggtaaaaatggagacctcaggggtcttccaaataacatagagaagatagttactgattggtgcttgtgttagttggaactgtgagataggtccttgtggatggactggcagagcatgtgaaagaagccaaaacaataagtgtacaagatgttcctgggcagtaagcactggctgccaaaggaagagacttttagttcggggtagtctgaaaaggcttcctggaagaacaaggtttggcaaggtaaagatgtaggatgcagggttacagtcatgcctcgcatagtaacatttctgtcagtggcaggctgaggtcacagcaatcccttcagagtttagtgcagcttaaacatgcttttaccttgtgacaccatgggcttcattatcacgatagcatcatcatagcacaacgtaaatgtgtttggatgttgcggctgtaaagagacgtatcccactgcctgttatataagagcatcacaatgatgaagtgctcagtaccaggaaagaaccatcccccgatatgcctgctcattctctacgctctatattgttattatagagtatactcttgcctgttgagatatctttcagggctggagatgcacctcagcagtagagcacttgcctgggatgcttgaggccctagcttgaattatttgcactagagggaaagaataaaacagtatgttgtgttttatcagcagcaggctcatgcatcttgtgttttctgtgtctctaagttgcatcatttaccatgtccttaattcactcttaatttcattttgttcaccatggccctagaagtaaaaagctgcccaatgtatatcctgcagcctaggtgtgtggttgactacaccacatatatttttgtacgtacacgaatgttcagacaatgcaagaatcacctaatgacatatttttggggagtatatcccaatcgttttgcttaaatggaagagataaaatgtatattagtgagggctattcagaaatgtctcagccccaccattttaaggggctaccataatctttttctttctttctagatgcagcagccccagcaggccccccagccccagcagccctcacagacccagagtcaggcccttggtctccaagcaatgcagccccagcagcctttggtaaggcctggtgtttggaaccaggatgtgggtttctcctttagatttagcaggtacactctccatagctatgacattttaagagggaaattgtctgaatatacttgaccacctttcctagaattctgtcagggttttgttcttatagtagttggcatattttttttcatttaaatgaataattaatatacactaacaaatttcaatatacaaataaaattttgcttcactcaaatcttaccatttttcgttctgaagaagaagaaaaaatagtaaagcgctcaatggatgagaaccttaccagcaagatattaagacattttctataaagagtaaagaatgatttcatggctatcttgccaaaagcaatctacagattcaatgcaatccccattaaaattccaactcaattcttcaacgaattagaaggagcaatttgcaaattcatctggaataacaaaaaaccgaggatagcaaaaactcttctcaaggataaaagaacctctggtggaatcaccatgcctgacctaaagctttactacagagcaattgtgataaaaactgcatggtactggtatagagacagacaagtggaccaatggaatagaattgaagacccagaaatgaacccacacacctatggtcacttgatcttcgacaagggagccaaaaccatccagtggaagaaagacagcattttcaacaattggtgctggcacaactggttgttatcatgtagaagaatgcgaatcgatccatacttatctccttgtactaaggtcaaatctaagtggatcaaggaacttcacataaaaccagagacactgaaacttatagaggagaaagtggggaaaagccttgaagatatgggcacaggggaaaaattcctgaacagaacagcaatggcttgtgctgtaagatcgagaattgacaaatgggacctaatgaaactccaaagtttctgcaaggcaaaagacactgtctataagacaaaaagaccaccaacagactgggaaaggatctttacctatcctaaatcagataggggactaatatccaacatatataaagaactcaagaaggtggacctcagaaaatcaaataacccccttaaaaaatggggctcagaactgaacaaagaattctcacctgaggaataccgaatggcagagaagcacctgaaaaaatgttcaacatccttaatcatcagggaaatgcaaatcaaaacaaccctgagattccacctcacaccagtgagaatggctaagatcaaaaattcaggtgacagcagatgctggcgaggatgtggagaaagaggaacactcctccattgttggtgggattgcaggcttgtacaaccactctggaaatcagtctggcggttcctcagaaaattggacatagtactaccggaggatccagcaatacctctcctgggcatatatccagaagaagccccaactggtaagaaggacacatgctccactatgttcatagcagccttatttataatagccagaaactggaaagaacccagatgcccctcaacagaggaatggatacagaaaatgtggtacatctacacaatggagtactactcagctattaaaaagaatgaatttatgaaattcctagccaaatggatggacctggagagcatcatcctgagtgaggtaacacaatcacaaaggaactcacaccttatgtactcactgataagtggatactagcccaaaacctaggatacccacgatataagatacaatttcctaaacacatgaaactcaagaaaaatgaagactgaagtgtggacactatgcccctccttagaagtgggaacaaaacacccatggaaggagttacagaaacaaagtttggagctgagatgaaaggatggaccatgtagagactgccatatccagggatccaccccataatcagcatccaaacgctgacaccattgcatatactagcaagattttatcgaaaggacccagatgtagctgtctcttgtgagactatgccggggcctagcaaacacagaagtggatgctcacagtcagctaatggatggatcacagggctcccaatggaggagctagagaaagtacccaaggagctaaagggatctgcaaccctataggtggaacaacattatgaactaaccagtacccctgagctcttgactctagctgcatatgtatcaaaagatggcctagtcggccannnnnnnnnnnnnnnnnnnnnnnnnnnnnnnnnnnnnnnnnnnnnnnnnnnnnnnnnnnnnnnnnnnnnnnnnnnnnnnnnnnnnnnnnnnnnnnnnnnnnnnnnnnnnnnnnnnnnnnnnnnnnnnnnnnnnnnnnnnnnnnnnnnnnnnnnnnnnnnnnnnnnnnnnnnnnnnnnnnnnnnnnnnnnnnnnnnnnnnnnnnnnnnnnnnnnnnnnnnnnnnnnnnnnnnnnnnnnnnnnnnnnnnnnnnnnnnnnnnnnnnnnnnnnnnnnnnnnnnnnnnnnnnnnnnnnnnnnnnnnnnnnnnnnnnnnnnnnnnnnnnnnnnnnnnnnnnnnnnnnnnnnnnnnnnnnnnnnnnnnnnnnnnnnnnnnnnnnnnnnnnnnnnnnnnnnnnnnnnnnnnnnnnnnnnnnnnnnnnnnnnnnnnnnnnnnnnnnnnnnnnnnnnnnnnnnnnnnnnnnnnnnnnnnnnnnnnnnnnnnnnnnnnnnnnnnnnnnnnnnnnnnnnnnnnnnnnnnnnnnnnnnnnnnnnnnnnnnnnnnnnnnnnnnnnnnnnnnnnnnnnnnnnnnnnnnnnnnnnnnnnnnnnnnnnnnnnnnnnnnnnnnnnnnnnnnnnnnnnnnnnnnnnnnnnnnnnnnnnnnnnnnnnnnnnnnnnnnnnnnnnnnnnnnnnnnnnnnnnnnnnnnnnnnnnnnnnnnnnnnnnnnnnnnnnnnnnnnnnnnngggacttttggtatagcattggaaatgtaaatgagctaaatacctaataaaaaatggaaaaaaaaaaaaaaaaaaagaagatcttatatattttataacattctcagagagtctgaaagtactttgtaaaatgacatgttagtaattaaaccaagtctctctatccagttagcattttctgcaagaatttccacattgttcataatctacagtccacttccttaacttctccaattgaatttgggagcatgtgtataacatggatgatttgaaaacctcagcgatgttgttgtccatggctcgttctactcaagctctacccgaggctggtaggttgctgtactcactgccacgggaaagcaacagtgccacaggttgtcagcccaggatcggaaagaaaaggagcatggagccatggcaggacactggggagagtcagtggagttccatggttaaaggctggacccgagcaggtctctcctgtggtaccagcccagtagagggtccccaggtagggaggccccagcgacttgtaacatatactgctctggccagctgagtcccatctttttccccattcttttgtaccaagtgtttagcttttccagttttgattccttttgtttaaaaatatttatggcaatctatgtaaccttgtttttttttccttaagtagaggcagaatgaaacttgcttctttgtcaggagcataaagttggctagggcaactttttaaaagaaatactataaaagagacttttgactggactactgcttacctgcatagtgttccaccaggaaagaagttgtaccctccctccctccctctctctcttacatagtttcaaacccacagaaaagcttcaagagtggtacaaagaatttccctgactccttcacctgtgctcactaagtcccatgcagccacatttgttttgtgattcccctcctccctgatccccacataccaggcaactgtcgccatgtgccagtttaatgttaaatatttccgtctgtttttctctagagcaagatggctgtgggttcagttagtgaagtgcttgctagcatgagtaaccccgggtgggatgtcagcatggcaaacacacaaacccacagacaaaaccactggttaggatggctgaagtcaggacattgaacactgacatcatactctgaacactgacatcatactctgatgtatacatggctttggatttttttttttttttttgactatggcagtggtagttcagtatcctttctgccatgtatttccctgcctccgggttattactatttagcttccatgtctcctttacccacacagaatttgcaacaattccaaagtgccctgacttcatcttagtaatgatgagttatttattcagtttttaaatgctactgagctgactcactgcttacgcatgacacccagcagtttctgggttgaagagctgcttcatgtacctacatctcaagagcattcataattcctggggaagcggtgtctgatggctttccatcttaaagtcactaacttctccttttaaagtagtaatgtaaggacatggtttcatccaatctgtcctgttgctcgttagactctcacgcaccagtgttgtcattggctgtctctccctgcttctactgtagaaaaagaaaaatgcttactctcaaatgctgtcgtcttgtttttgattgcctggtattcgactcacaggaagaacttccccactgttgtttgtctgtctttaagtcatgtttcaaatacaaaggaaggtgtgctttttctttaagatttcatttcagttttaattatttatgtatttgtatgtctgagtgttggtttgtgcttgtgagtgtagtgtattctgagatcaatgaaggccctggtactggtattatatgtagttgtgagctgcctgaagtaacttgggtgctaggagcggaactcaggtcatgtggaagagtagtgtttgctcttaatgttgagtcacctctccagctcaggaaagcatatcttaaaagtgaaatctaccacttgaccctttgacttaacaatctggcattactaagagtagcttgaagtcttctcccaactttactgagtatctgttgttacatagcaatagttagatgaaatttgctgaattagaaaaatcatcaaaatcggggctgaaaagatggcttattgttaactgctgcactggctgctcttccagaggctcctgaggtcagttcccagcacccacatggtggctcacaaccatctgtaatgggatccaatgccctcttctggcatgtaggtttatatccagatggagtactaaaaataaatacataaatacagatacataaaaataaataaatctcttttaaaaatcagggaggggaaaccaggaaaggggataacacttgaaatgtaaagaaagaaaatatctaatacaaattaaaaaattaaaaatcatcaaaatctttccccagtctgaaggtctgtccatgggagggacacttgccttgcccatacgggtatctctgggtttgatcccccaaactgtaacacaatgaaaaaatttctttccattgagtaggttattaagtcacacaaacagaacttagcactactctctgtgttttctttctatacacagccagatattctaaaggttttgacggagagccaaaatctatgtaaataggtcttgttgagtgtttggaacatttgatactgactggaaaaatcctaactcctcctttatgtaaaacaaagatttttatgctatagtactattgttaccaacagtgttgagtgtgatcctaacggaagtaactatcacatagttacacctttctagtgatttatgatgtacgtgagtccttgttaaatgtaagaaacccaataattcaggaatggtaacttgtatgtagtaattgctaatgaggaaatgattgtacagtaatacccttttagcaaaaatacaaactttaaatgtagttattattgaatatatgataattacagcatattttaagctttttaaacttttgattcaggtatgtaatgaaatgaaatattgcatgctctgttcctcacaaataataaaatccctatatttcaattacctatagtcattcatatttaatctgtactttttcttataaggaaaaatttaaagattcactcacacagatatgtaacagatgcgtaaatcctaaaacatgtcattgcctgtaacatcagcactgggcaggtaggaacagcaggatggctggagttcgtgggcccatcagactagccattggggagctctagggtcactgagagacggcccattcaaaactacaaggtgagaagtgacggaggatgacactcaatgtgaacctctgccttctgccgtaagcttgatttagaggttgggtcagggattttcctccacctgctactaaatcatatttcatttcatatgtaatagtgatatatgatgtcttggttacttttctcttgccgtgaagagtcaccatgaattgggcaacttataaaacaacgcattttacaggtgactctgagggtgagtccatgaccatcatggtggagagcatggcagtaggcaggcaggcagtggtagtagcatggtggctgagtggttacatctacagaccagaggcagagactgggcttttgaaatctcagagtgcaaagtcccccagcccccagtgacacacctctgaattcatcataagcactacaactaggaaccatgcattccaatgtatgagcctgtggagacagttcacattcaaaacacggtatttgagaataatgaagatacaatgttagctttgttcatagtgtatgctgcataattccttatgaatggcagtaccaaatgccttagatgtgtatgttatttggggtaggataaacaaagaaactgaattctgttactaaactgtatttataggtctggggaatttttttcattgtagtttaaaacagtgacagagttatacagtcatttacccacaagcattagagcatagctcatcaaagggagcttgacatttttatactcagattatagttctgtgaatacttaactgagttattgtgtagaaagaacatgcaatttaatactgatttctaaggcaattctgttgattattagactgtgtttcacccaccggcttaccatactaccaacccaaggactgaggaagtaattcagaacttggaagataactttttttttctcattatgctcatgagaaagtaatttgatggaaataaatgcctttattatttattaataagaattttaataatctgtaatgagccttttattttattttattctgcttggcagaaggattccaattctcactgagaaacacagcattgtttcaatagagaacaatctttcataaagaatccaagcaggagttatagcttagggaccagctggtatgtgtctgtgagcctcagaatgggctgggaaatttacaacatttacatctaagtggtcagttttagaattagaaattataggagtggtcaatactatcaagatatttcatcattataattctttttaggtttactttagtacatctgtatgctatctatctataaatctatattctctattatctatctatctatctatctatctatctatctatctatctatctatctatctatctatctgtctgtctgtctgtctgtcttagtgagggtttctattcctgcacaaacatcatgaccaagaagcaagttggggaggaaagggtttattccacttactcttccatactgctgtttatcaccaaggaagtcaggactggaactcaaacaggtcaggaagcagaagctgatgcagagcccatggaggggcgttctttactggcttgcttcccctggcttgctcagcctgctctcttatagaaccaagactaccagcccagagatggtcccacccacaagaggccttttccccttgatcactaattgagaaaatgccttacagttggatctcatggaggcatttcctcaactgaagctcctttctctgtgataactccagctgtgtcaagttgacacacaaaaccagccagtacactatgcatctatctattggttgtgacctaagcctttaacaactgagccatctcttcactttccacttagagacagggtgggacatgactgtcctggagttcactatctagctcaggtgggcacttaacttacagagatgtgcctgcctctgcattcccagtactgggattaaaggtgtgtgccactacacctgggtatacacatacttttaaattattttttgatgtagttttatttttcagttgctgaaccattcctctactgttaaaattttggactgttaccagttttaaagatagtactgttaaagatattttggtatgtattctatacctcttcttcattgtctcataatagaaaacagatacaaaaatattttcaactaattatgtatgtcaatatcaagggcacaatacctcagcaactttaaggaaaaaaattacatttcttttttgattacgttcactgagattcactattttttaaacaccttggcttctattcataatagacatccttagcagatccaactcgtgtttcaggcctgctctccccttcagttcccatctttggagaagagggtggtgagctggttgctgaggagaggtgagcttggacttctctggggttgtggttgatgttgcatgaagggaggagtaagttaccacaccaccttcctgacctgccactccctgcctgccgacgggtacagtggattttagatcagtacttatttgttatattcagtagaggccagcagcctgtgagacattagggagagtgccatggaagtaccgagtatgcttttcgctactggaggactgagaatcactggaaatggctgaatggccatgttgtacatgaaaagtagcatatggtgggtagacctttttagttgaagagcttcagaagttgtactgatttgttagttaggtatgtgaacttacgtggcttaaaagtgggtttgtgtttttttcctctctgttctggaaactggaagtgaaagatgggaattcagcaatggtggttccttctgcttgctgatgggagagcccatgccatgcctctgttccagtccctcactgtgcactggctgcctttagtatctgagctttgtgccaccctctcgtggcgttctcactgtttgcactaatgtgcccacgtttccctttttatgagagtaccattcatgttgtgttagattccatggaaataatcatggctacctctagaaaagctctacctccaagtaatgtcacaatcctggggtttaagactatagcatttctattttgagtgatagagttgaagccctaacagagatccaaagatcgagaaacgtggagcccatgttggaaagcttcagcgtaagccaccatgaaaggcagtgctacatctgttgccttttgactgtgactttgtcagtctcctttagttggtagcatcagttgggacatggtaggcagtgacaatgaatacccatagccaagttaatcactgtataaaggtgtttttaaggtcaaaactgccttaggacagaaactgtcacctcttcaaggtatcctatggaagcttttctgtaaagtgagtgtgaaagattaagagaagcccaataccatcagttaagtgtggtgacaactttgtgtgcattcctgtgtcatttgtggtctgggaagaaagggcaactagtggtagcctctgtcctttctggggaaatttgtgtggtgtctcaagcttggtcataagtgtagttcttgacttataatcctttaaaggttcgtgtgtttaaatgactattaactctgtttgatagatgtagaatgaagctccttccaacattcaagaaaataatatccatactgtgtaactaagtctattcttttcatcttatgctgtcttaattgggtgacttaaaatgcactcgttcttgggggaagattatgttgtattccattttgcctttcaaaaaacatacatgatagcagcattagttaagaactgctgtgacttttgaccagcagccacagacaaaagttttatactggtctttctcggggaattcgtgctctgttatgagaaattgagatcgatagttctaagagtgcccttaggattcagtagccaaatgacacagctcccacctgtatcatgagaatattggtagtaaagggtcataggtctttattattcatagtctaaattcaaatatctctgaaaattcaagattaaacatccaaagctgaggagaagggacatccagctctctctctctatgcattctctggaagggggctgtgtggatgaatgtttgcagaaatgcagtgtgtgtggagaagggttcagccctacatgacatgatgagagctaacatactaacttccatgttgacacacactaaacatgaaagcacctgtaccaaaagctttgttaacatcattgttcgtcagaatcaagcgccagagtgtatacctataatgcccacaatagttcatggcacatagcaagacttgttaaataggattctaagcattgaaatggttgaattaaaaagaaaacacgtgccttcctgaattttccacacagaggaatgattgttgttctgttttcccagacctgtatgtggagagggttggtgctggcaatggcttatcatctttgtgtgccattacacatggaagagtcatcttggcaatgctgtctaaagttagagttttctgctaaatctgaatttcaggcaagcagttagcaaaagtgttacgtcaaattttctgttgggttacttggactaaattcagtatttgtcacgtgaaatattaaatattagtaaaataaaaaattccttgttacttgtctgaaattcacatttagctatgcattctgtatttgaatttcctatatgacttaacagtcctgggcagcttttagtcatactgaggacctccaaggaagagggaatcatgttgcattcacattgagaatggtcttattaaaaactcgttagggatgtgaagcagattaaggacaagcaatgcagatgtgttacaggcacagcacagacctctcagcctagtgtggtgagaagaggggaggtggagagagcccagttacctgagggaagagctcaggcacggctgccttggatgcactaggctggcagagagccactgtggaagaagctggcaaaaataaagaaaactccttaccatgctcctccctggcctaggtcagctctcactttctatctctggagatgctctctagggtgctgtgacagcctggttattgtgttccatacaggcagatggcacagactgaggttaacaggaaacaaccagttctttgtgtatgactaagagatgctcgtatcagagcatcccagttgtttctaagtcgcaagaagacagctgaggagtagagaaaggaaagaaagagaggcagtccgacacctgcagttaggaagtgtcctagtatcattggtgattctaatcaaaaacagctttgcttctagcagacactgatcagtcagtctccccatgctcctcaaacatcagccgcagttccttgtgtggtacttccaggtcccctcagacagggctaggagaaaactccttaaaatgtgagtgttcttgtgtatggcccagctcaccctgccatggctgtcaggtggaggtcagatgttccacaaacccatgctctatctcacaggctctgctctgccctgcccatggggtctgttggcattggacagatctccacagcagagagctttcatcttgtcagagaggtccttggatgagtgggctacctctgtagtgagcacttcttcatggaaactctaaagataaatgccaagcaagtacctgcgggaagcactgtttggccagctgtaccgtaggcaaaaccagacgtatccaaactgagcatgtgaacgtgccttagccagccccgaggtacagcctgtgccttgtggagcacgagtggctgactcatccttccccttgttgcaattacagttccccaggcaaggcttgcagcagacccagcaacagcaacagacagccgccctggtgcgacagctccaaaagcagctttctagtaagtacctatctcacactgagccaggggagtctgggagtcagcgacaagcccggcatagtaggctcttcagaaatcacactgtgtcctctgaaacatttttaaagactttttcattgaaatagagctccatcactttccttcctcgctttcttctgtctcctctctcagctactctccattaaacccctcctagacctccactgtccactcctcctcttttatttgactacttttgttacatacatacatgcatacatacatacacatatacatacatacatatacagatgcatacattcatttattcatacatgcatgcatacacacacatatatccatgcatgcacacatatgtgcacacatacatatatgcataatatatgcatacatgcatgcatacatacatacatttttttttcatgtttggcttggtctgaggtatttcactttgtcttagtttgattagttttggacttacctttttcttcccctggaaaagccacatttttccccttaaattcagtattttcctgttgttttatgtgactttcccaaagcacacccaacccccttttgttggttttattttatggtgctgaggatagaacccaaggcttcctgtgttccagacatgtgttctactgcttaacctcaactccatgcccgggtcttgtttttatagagctagaaatgtttaaggagaaactcatcccatgaccttgacttagatcacccctataccagtatctcaggatagaatcgttttagagatggagtgagtcccttgtgtggtgaaacatagtggcctggagtcacaagacctgatttctttgccaaggtggccattattggctaggtcacgttttcccacctatgaaagtataggagacacgttttcccgtggctttcagattcagtgtttctgagttacagggtggagtctgctgcatgttgaaacagtgatgtggcatccatttgtggctgaggggtagctttttgcatgactgctttgcatgtgggaatcttgacagagagaattgccccccacctccctccacactccttggtgtctctgccagtcatatcttaatttttctttattttattttgtttttgtttttggtctttaacatataatgtacacttgtctgtgtctttatgtaacacatcaccatgttccatgaatacatacatgagatttttctttaatttccaaacctgaaatatgtgtgtatgttttcatgtagcctcagttaattttggttacgtgaagtaagatcaatttttttcctagctgttttttttaagtaggtatactctattaaataatctgtgattaaaacaatgaaatacgacgatatttttgagttaaaattcttgcagagaatataacctgaaggcttggccttatagtgtttataaatcagcactgaggagtcctgtattgcagacttatctgaagagcatgtcagcttgctctgctgtccccagagtgtcaagagctggaatacagctcttggacactgtgagtcaatctatctaatcccgaggcattgtgtgggcagctgtgggtctctcctgtagacttggcccctctacagaatacatttggtcacattacatggttattggccccagggtctagcctgttgctctgtcctcccatacctggggctgttactgagaggcccgccagagagaaggtgttatctgcagcaccagttcacatctgtaactgttgtgtttgctttccccttaggtaaccagccacagcaaggagtgactccctgtgcacacccttcacacttttgaatcggaaagagaagacatgaagtttatgtttgcactgaaaaacagaaaatcaaatttagtagtcctcataagacgtctcctttggtctttggttatttatgttttcctatattttatgctacatttcatgcagaagtatttaaataagtaaaggagtcatggtttggttttatcagatttaaaataggttttaaaatgtggatcatacaggcctactccagatagtgtggtagcagaccttttgaaactggtgcttttttatctcatatttacataaagaatgaattatggtaggtttaaatatttatgtattcattaacgattttttttaaacctgtggtggaccaaactactgatttgaaagctgtggcaggtctcgcgggagtggacacattagctcttcactcgaccgtggcggtggggtgaacattttttttttttttgcatcactttaatttgaaatgttgatcattttcataagcactttataaacttcgttcgcatttatgaaggacttggcttcgcttttgttgtggtccaaaggtgctgaaacggattgttgcttagtacttccgcttcttcagggcttctgcaagagccacctggaggactgtgggagtctctcagaagcagctgcactcaaatttgttcccagtggcaaaatctttatccagattcttcatgaaggtacaacctataaccacgggaggccagaagaaccacggtggaatcggtccattttacttactgccagttttggtttaaaaaaaaaaataactgtccagtttaggttcttcagaacctcatgccaacttgagaaaaataaaataaaatctcacagctggccttagattccacagtgctcagacttgacatggtttccagagggttctggtagtcatcaaaggtatacttgctgttaattttgtatggtaagtatttacaattttgaatttaattattaatgttggtgtcagtcttggttgtgtattgcttctactgtatttataaaccggtgcaaaaagcacaagtaaagtaaattatacatcaaaatttattataaagaaatagtaactattttaactttgttcaagtatgtggtaatttgctcctattagagtgaaaaaatacagtaaattattatcagtttgtgtaacttaagagtattccgtataatatttttttagaattagatgcatacaattttgaatgtgaaaattgcagggcattttaagacatgtagggatctttccctgtcctttgttgggttcactttctttttgccatatgatttcacatgtaatgtagtcaagcatactgtgaatagattgtctatgaagagcagaccctgtagaactacttttttaaaatgtagctagtacgacttcagatgatttctttcgcagattgttattataaataatttatatcttcctaggtgagttacccattgcagagtttgactcattcaaatgacctcagatccatgtttgcttactttgccatggcgacatcgtgtgaactgctgtgtacactgtgaaatatacccctccagcctgcttgttttgtgtttactctgggctggaaaagactttgccaaacattaaagaccattcttcccaccgagttcacattctctctgctctcagacagtgcagtacatttcagtggtcccatatgtccgctttgctttcctctccagagtcattcttaaaattcacgaagctatcctcctccctccccccgccccgggtaatagaccatatgattgcattcgcaaaaccaccgaagtgtgaatgttgtgcctagtgagtgggccatatcctgtcctctctggtcttaattcaatgattgttgatggttaaaactccagcttcaatctgaaccttgtccttttcgtagctcaatattgtgaacagcagaacgagtgttagaactgcatagcatttgtttgcactttaaactttgcagaagttaatttattaatcattttgcacatgaaggctatggttattcctttgtcgttgtttgttttatttgttaagatgaggaaggtaaatcatgctaaagccctctagttctgagatgccgtgggggatgaggaaaaacctagagctctttgccctgcgcgttacaaggaaagcaactggaattttaaatttagttattatatttactgccacttaattctgcattctgagaggtttttttttttctttcatagcaaatgcatgtggttggcattaaaattgtcctaaggaaaaagctctattgcagaaccttgtcatttgctgggtgggttgcagataggaaattaaagaccagaccttgaaatctaatggaattgggtatacttaccatttctggctataagaaccccttaacatctgtgttatattgtaagctgaatctttagagggtggcatttcttgttttatgtaccctttttcatctaaaagtagagggagactactctacggtgggtatcatttgacctctggcagccatagagtaccaatgttaactggagtcagctcatgtctgaggtaggggccaaaagaaagtaggcattacggaaagtaggcatcaagttccagatgaatggcatgtgctaacaaagctcttggtcttagtgatctgggctaactgaatgacttttgcttttttaatttacaaggctcctttataaatagatgaaataaatttataagtagatgaaatttggacagaagccagagaaattattctagaaaaatcccagtctttagaataaaagaggtgaatcatatgatactcccacatatatttgggttaaattaaacatgtaatgttagtacggtgaaatatgaaaataaaacccaccatttaaatacagtgaaacttgattatatagaagcagttgtctagactcgtggaggaattctgccttagaaagtctgtcttcagaatggctctgaaccatgggtgcctgagcaaggctttaaagttataaggaagtgtcactgtacctgtagagcatttcaggatgacaggtgtggacaaatgtgaaacccgctttgcacttcccaatgtgtgagcattaggctgccctgtacatgtagaaaagctagcctgcatttgttttgtcttgtttggtttcatttttaacgcaggtattaaaacaatgggaactttcagtgtgaacaaatggtaaactattaatcataatcagaacagttctgcgcttgttttctgtaggttttatcaaaatgtttgtaaaccagtgacaaaatatttgtgcattgagattaacacgggctgcaaacctaatctttcacgttgtctccattcattctgtgtgcgatgtttgtaacattggtggaaaacagacacaaggcagctggcaactgttagcggaagaaaggtctttttactgaaaattcaggtgcattcgccatttgttaatttgtagcggatcattttctcttaatgttttttattatttgttggcaaaatcaaagtgccttaagttaagagtttgctttgaaatccatggaaactcggaatcagttcacagtgcatttatttacaagtctcactgcatgtccattgtaaatttaatactgtaaatgtattcggattcatttacatgcctatggctgcctttgattaaacttcttccaaaaaataaagtctgcagatgttggcttttgttccattcagtttctcccttcctgtcagaggacctggatgtaagttgttgcataatcggcaccaagcacgttctgtgctctgcatttatagacgccagaatctgaggctcgtagattctgaatgaccagcgtaccttgtaggggaagcatctcacttctgtggggccttctttctgtcgccgttgagagcagggagtatcccggcgtctcccaggtgatttgtggcttggggactcccaaggccacacagtggagctgcattgcctctcctgtcctcctgagcatgctcctgggaaggtagtttataattcggggagggtaggccacaatcgtcacgggaacactaataactgcctggccaacgctgttttgagccttacagatataatttcctctgtcatgagctgttgtttctttgatgaccaacgtgccattttcatgcaatatgtattttccaccgacttgaggtctgtcgattacaaggccacctggcgtagtccatttgacatttggcttagggattccatcagacacacaatgcagggatagcgattccccaccggcgctctttatcatccccggttcgtatgtcagaatgactggcttctgtccaatttctaacaggatgagtttctcgatgtagccaaccttatttcttgctgtacagcgatactttcctgacttgttccgagttgctttgtaaacaatgagagaaccattgcttgccatcagatatggggaattttgtggcccattagcaaattgtgtgccatcaggtaagatccagataatttcaggtgttgggttcccatccacagagcagttcattgctacaggcttgccaacctgggcaactactttttcattgaatgggtttctgaatgttggtcttctcagcatttccagtacttttaactgcaccaccaacacactctctcctccttcgctccgaaccacacaggtgaaatccgcagaatcagaaagccttatgttccgaatttccaaggttccattttgatgcacggtgattctgcctccgtagtatggagccgtgaggaaaatattgtctggcataatccatgtgatctggggtggtgggaccccatctgctctgcagtccaagtgttttttggagtgctgaatggctgtggctttaataacagttttgtttgcatacaaaccattgattaatggaggcctagagacaatatccagtttgtatgtcttagtgtcatccccactaggattttgagctacacacacatacttcccagagtcaagcggtttcactttattgatggacaaagttccattggcatgaaatatgaacctgtcattggagaatgaaatgacattgttggaaggcagcaaccaaaatacatttggcttgggttccccagtgacctcacagtccaggacagctgtgtctccagccttgatccttacattgctcctgtagttttgccttatccgtgggatggctgttagaactgttaggtgaactttcatttcatctttccctaaggtgttctgagcagagcaaatataatctccttcctctgccatcccaactttgttgaaatacaaggttccgttgtggaagagggtgtacctcttggtcctgtagccactgtcatcagcttgtgctacattgttcaccactgttccatcaggcaaactccaggatacctcaggcacaggggagccagaagccttgcagtcaacttggaaatctttcccatggagtacttgcttcttaaaatgctgcttgtgttcaattttggcaggtgtcagtcttaggcggacatgcatcaggaccaggtcatctcccattttgtttcttgccacacataagtagtcaccaccatccttttctgtcaccgatccaataaccaaggagccatttgggtagacatggatccggctgcccattctaaggagagaagagacaagcgtgagaatgcagcggggagaattggggcttaggagatgactcagttgggaagctgcctagtgcacaattttcagacctgaatttggatctccagcgcccacaaagagttaggcaaggtggtcacatccatacccccagaatggacacagctggcccccggagcttgctcgacagctggtgtacctgaaagtacctacagctctaggctcagtgagaggccctcctgagagtaaggtggaagcaattgtgtaagaccccaatgcttatttacttctggccaccacacatgcacacaccaaaatgaacgagcataccttgcacaaacacataaaaagactaaatattgtcaccaatgtagacacatttacagaatattatactatgtagaagcagccttatttataggatgttacttccctccagccttactaagagctgactggcacagttgtacatacatgtaagtaatttagtaggaaattgtgacacatagataaaatgaaaatgattatcacgatcaagctcatcaccttgtcacctttccttcttcctcttcttctctccctctccctttcccttttcctccccctctcctcctctttccttccctctctctctctaacatggcattatctttatggattattttttaaagctgttaaaatgaagaccaaagtcacttattgttatctaagccatttgcttaaaaaagctttgtaacaaagcataatttgctggagacagtattattttcgaaatggccttcaatcagctcttttttatacaacttttagaaacagctcactggtgagaaggatgctggaagtagccagttcttaagacattttatatatcaaatggatccacaaaaatagcatatcctgctaatgaaaaacaactcgagggtatgtgctgagttaatgcctgatgctaatttttaaatgtgttaacgaagcaactttttagttatttaactagaagcaatctgtccattgcctgctgcagaggacagcattctaggatgaattagaagttgaatcacctgctgcgtaattgacacagttgaccaccaggtggcagaccctagctttagtgttaagaacatgctcaaacacacctgtgtttttccccctttcttttgacaacatgaggtaaacagaatacttggagctcaggcttcaaggcaagaatgtttgagaagtgatgtggggtaggtctaggcattggtgttctggcgtgatggttatgtgtagcagacactaaggactaaagccctaaatgttggttcttgacagtccctcccttaaactgtgttacactgtatgggaccagacttacgcacattgcttggtttctcgtaacagtgattcagatagagctggtcagggacattgacctcgtgcttaggaaaattctcaagttgcttacatgggccattaagtttgagacccagactcaaattctagtgtgcatcacaattacctgaggggcttctaagaacacagactctttatcaaaacaatccctgcttctgattcaagttcttggttaatattaatgatactggtaaagaggcaaccttaaaaaaaaaaaacctaaggtgacaagcctcaaatctgatccaccatcgttacaatatgtaacatcctccattaaccaacacttgaagaatagtgacataagaaaaggcttatctgcttcggagagggctgggaactaccaagtagctttgaagtaaaaaaacttcaaaaagagacaaaacatcagtttgacaagactgtctttccttcagctgtcaacttggcaaggcctaaaattaactgagagtctcaattggtgggtttttgcatactacactggcctgtgaatatgtctgtgcaggattgtgttgattgacaaagggataccagccctccctagttgacaccatccctaaacattttggtctgacctgtgtaagaaatctagcagaacatgattcagtaagcaagcaagcagcatgtcttcatgctccttcttcaagttcctgccttgagtctgccttgagttccaactgtgagttctctcaatgttggactataacctgtaagctgaaataagccctctcttcccctgaattgtctttggtcatagtgtttgtcacagcaccaagaataagctaggacaaaggtgatataacaggtataaatatatgcacttgatatggtaccacctggatatataatatataatattattagatataatattagatctaaggaattaagttcaatgcaatgatagtagatatgtcaatatttaatttttaatatacatatatacatagaaaaacatatacatatatgtatatacatacacatatatacggaaaaactaagaaaaacctgagttggaccacactatagagaaaactgatctaatacacttttaaggatacttcattcaaccagtgtaacacacagtcatatcatcagcacatggaattttctctaggtgagttcacatgtcaagtgtcaaatttttaaaaatttaaattttattgtatttcttttcagacaagtgaaattcattaagaatgaaaagccatatagtaaagtggaaattaaataacatgctactaagtggacagaaggcaattgaaacttaaaagagaattgtaagaacattaaaattgcaacaaactatcaaaactgtatgatagaaaaatcagtattgagaaaaatttataacatgatatgcaatcttaataaaaagttttcaaacacaggatcctcaaggacttagggaaacaaacaaaaaaattaaaggaaaagtaacataataaaaaactaaaaactaaacaaaaccccaaaaaaacaaaagggcaatgaaatctgtgagtttaaaaaaggagaataaataccatctctaaacctttacatagattaataaagaaaaaagttgacagtcacataaatcaaaatggaaacattattgtactactaacaatagttaataatattgtaacttggcaggatctagaatcacttaagacgcaagtctctagacaaacctaagaggatcatctagattgtgtagattaggttaggatctgagcatgactggagaggttttattgattaattgaattgaaaagacacatcctaaatgtggacagtgtcttctagcagcagcgacataagaagatccaaagcaagaatattgacgccctttgacccacttcccctgtttcttgttagtaaactgacctactctgttgcagctgcctttgctgacatcagaagtcagcctccttggtctgtcaaattgaactgaagaccaggcctttagtgccagactggagttactgacactcagcttcagggacagtgtagctcctggctctcggcatttccagtgtgaacacagcaattggactccccagaccttgttgtggaagccaattgcattcctgattagtacatatttatgctactggttctgtttctctagagaaccctgatgctacagaaacacaaaagattattttaaaactactatgaaaaagtatatggcaaaatcacatgaattttagaagtactgtgcaagtttctggaagcatgtggccttctaaaactgatcaagaaatagaaactgtaattaaacattatagcagtaatgaaatgtcttctgtctaataaaaatcttaatatcttacagctgtactgatggtttatatgaatatgtaaagagttacttccatttcttaaagtatgaataggcaacccatttccatcattctaagccaaaacacagcaataaaaaaaaaattaaacccatacccatgatgaacacaaatgcaaattttctcaataaaatagaggtaaacttagttcagcatttcaatatgttcatagaacatgatcaattaaggttaaccccaggaatgctggggtggcttaacatttcaaatcaataaacttaatacaacacaatcaaagacaaagccatgtgactatctttatagaagcaaaagaagcaattggttgagtcttagtgtccttttataatgagtcaacaaatctatgctgaaggaacgtatctcaaaatattaaaccctatatatgaaaaagtctaccataaatatcacactggactaaagggctaaaagtgtgtcttcttaggttggaacaaaactctgttttcactgttcttactcaaagccaaaagaattattaacctgttgtttcaatgaaaaccccatcaaaattccaatcacttccttccaagaggtaaataaagcaatcctataattcctatagagccacaaagagtcagagtagctgcagcaattctgacagtgtgtgtgtgtgtgtgtgtgtgtgtgtgtgtgtgtgtgtgtgtgtgtgtgtgtgtgtgcatgcgcacgtgcatgagagaaagagctagagcgagctggtgttgtgaaaataagtacaaagttgataagtgaactattgaagataccgaatgtcaagatgggaaacacatacagaggagaaaatatatgtaagcatgtggattctaaagttcaccctctttagctaagcactttaaaactttacatcttagtgaactacagtctaacatttaaggtaattttgattcctgaaaaacctgaaaattaatattgacatttaaattaaaaattacaaatttattcattatattgtgtaccaacttactgtaatactagggaaaaaaaccttcaatttccaagtgtccatgtaaattcatatgtactatgtttaatttctattgcatgtatattttaataaacaagtgtaaacggaaaagcactcagcttcatctctttctagcatcctataaaagcattgcacaatgtcatgaagaacacaatttatagtccacaagctataatttttgcttttcagaaacaggatttactatatagtgaagagtgtacagtgaatatcaatttttagaaagagcacagtaaaaaaggtttgtataggtaacaccaagtaagcaaaggagataattttaacagaaaggcttacctgtgccactggtcaatgacaaccttggatggtaacttccagattattgtaggtttcggatccccagtagctgagcagttcagtagtaatttctcacccaaattcacctctgtccatttctgcgaggcagtttctatcctgggaactgtctcttgctcttctactcttagaatcactacccttctctctgagcccgaggagctggtagcaatgcattcataagtgcccctgactgaagaaacgatgtttcttatatacagggtcccatttggatacaagaaaaacctggaatgagtcaactgcagtggttttagttcagtcccatcatagaggacccaatgaacactgggctggggagttccctttgcagtgcagggcagtttcaaactttcacctaaaacgccaacgatggcttgtctcttttgctctataataacagggggagctgtgatgacttgtatcttaaccaacagtgaatcctggccagatgggttgttggctacacacttgtaaaaaccacggtcataaagactcaaattatggatgatcaacgttccatcgggtgtcacccagaccttccggcttccctcgggtgtttccgagaccactgtttggtttgcgagtatccaggaaattgtaggtcttggcataccttctactctacacttaagtttcacagtacttccggaatgagctgtgatctccttgacatgactctccagaatcctagcagggtaggagaccacagacagagtgacatgaaggtggtctacacctagtggattagaggcagcgcacaggtactgtccacggtcctgaatgctgaccctctggatggacaaggtgccattgggaagcacatgaaaccgggttttctgtatccctcgggatatttcacgtcctgataaaatgaaaaaaaaattatagaattcatgatcattgttgaactgacaaaaaatacaatgaaattgaaaagcatagtcttcaggtggttaaagctgtttttcaattttttattcacataaacttaaatttaaaatccagatagttcaacatgatatttatgtaaaattatatatatacctatatatatatgatcaattttcaaagtattttggccttaacatttttattcatttattttaatgtttttatttttgaataggtcatttcaccctttctcctccctccaatttcttcatttatctcctcttatttttattcatttattttaatgttttcatttttgaataggtcatttcaccctttctcctccctccaatttcttcatttatctcctcttgctctttcaaatttatggcctctttttctttaattattgatatatatatataaacatgatctgctcagcctatacaatgtataaacctatatgtatatggttttagtgcagacaatttaatatcagagaaataattggtcctaaatgttgttttaaaatgttttaagacagaatctaattttatagcctaggctggcattgaattcatccccgttgctggcagtataggcatgtactatcctatctagccttaataattactctcttaaacttcccttatcaatacgttttaatgatttgtgtgtatatgtatgggcacatgcatgccattgccagtgggtagtgataagaaaacaatctgagggagttggttctctctgccatgtctgttccagagactaagctgacgtcatcaagcttggcaatatgtgccctttacacacagagccatctagctgcctcccaaaccattcttaacacattataaaaaagaaacgcttggcaatatgtgccctttacacacagagccatctagctgcctcccaaaccattcttaacacattataaaaaagaaacgcttctagtaggggtagagagatggctcagcaggtgagaacactagttgttgttgcagagaacctagattcagttcccagtgcacacatgctggctcacaattatctgtagttcaaattccaggaagtatgataacctgttctgacctgtgtttacttcaggcacacgtgtgcatatacacatatgctggccaaacatgcatacacataacataaatataaagtttaaaaccttctggtaggggctagagaagtagttccagctccaggaaatctggtacctcttagtgcgtacacacacacacacacacacacacacacacacacacacacacacacacttaaaaagtcaaatctagcttttatattttgaagaaatttaaaactagtgttggttctttgattactatcctgaaagatctgatcgtgtccctgttttgtaactaaggtatagctaatggttccaagtacctgatgagactctggtccagtggatggtgggctttgggtctccaacagcctcgcaaggaagaaggacatctgaattagttggaacagtaaagcttgcagcctttcctccaattattcttggtttcttcaatatagtcttaggcagagagtcatagggcaggtgtttggaagttgggttttgagcaggtttcttatcaaagacactcttttctgcatgcctctgtgcattccaatgcaaggcatgagtgctggcctctggaaagctgaggtggggtgacaggcttatttctggccttttgcccttttcaatggtttctgagtatgacctgagctgaaatttgttttctggccagggagaaggcttccattgagaatcctgtggtttatccactcttggtgctggcataggagtggaggtcaacagactagagaggggaaagtcagtggatccagttaagatctcaggattggggctagcctctgctgagggttgctgcagatctatatcgtgccttgaagattcatatatggtgaccatcctatttgacatcatcttgaaaactgctgggacctcactgtctgtaaccacaaccttagtgaagggaggaggggaaggagtaggcatt

SEQ ID NO: 791 - DNA, 4090 bp, Mus musculus
gatgaatcttcaagtcatgaatgtaaccagcgcacaatccttctctatggagtcggaaaagagcgtgatgaagccaggcatcagctgaagaagattaccaaagatatcctcaaaatcctgaacaagaagggcaccacagaatcaggggttggggacgaaggacagaaagccaggaagaccaagcaggaagtttttccaaccccggaaaatgtgttcacgaaactccaactcctctcatacttcgatcagcatcaagtaacatctcagatctctaacaatgtgctggaacaaatcacaagctttgcgtctggaacatcctatcacctcccgttggctcaccatattcagctcatctttgatctcatggagccagcgctgaacatcaatgggctgattgactttgccatacagctgctgaatgaactgagtgtggtggaagcagagctcctcttgaagtcttctagcctggcaggaagttacactacaggactatgtgtctgcattgtggccgtgctcaggcggtaccatagttgcctgatcctaaatcctgatcagacagcccaggtgtttgaagggttgtgtggtgtggtgaagcacgttgtcaacccctcagaatgttcttccccagagagatgtatcttggcctacctctatgacctctacgtatcctgcagccacctcagaagtaaatttggagacctttttagtgcctgttcaaaagtaaagcagaccatatacaataatgtgatgcctgcaaattccaacttacgctgggatccagactttatgatggattttattgagaacccctcggcaagaagcatcaattattcaatgctgggcaagatcctcaatgacaatgctgccaaccggtacagctttgtgtgcaacaccctcatgaatgtgtgcatgggacaccaggatgccggccggataaatgacatagccaatttctcctctgagctaactgcctgctgtacagttctgagttcggagtggctgggggttctgaaggctctttgttgttcttcaaatcatgtgtggggatttaatgatgtcctctgcacggtggatgtgagtgacctttcattccatgattcattagctactttcattgctatcctgatagcacgacagtgtttctccctggaagatgtcgtgcaacacgtcgcacttccctctctcctagcagcagcttgtggagacgcggatgcagagcccggggcaaggatgacgtgccgcctcctgcttcacctcttcagagccccccaggcctgctttttccctcagggaacaggcgatgccaaaattggcagtaacaatgtcaacacgatgaagaatgaagacttcggcatgaggggtttacgacgtgatgggaatgctgaagatgcctgggccacctcgcagaactcaaaatcgtatgggaaaagtatttccatagaaactgccaatctcagagaatatgctagatacgtactgaggactatctgccagcagaatcttgagcagtggacgttgagacagtcctggctggagctccagctcatgatcaaacagtgcttgaaggaccctagctctggttctgtggccgaaatgaataatttgctggacaatatcgcaaaggcaacgatagaagtgttccagcaatctgcagacctaaataataatgcctccaattctggcatgagcctcttcaacccaaacactattggaagtgttgatccaagtagcacaagacagaatggaataaagacattcttaagttcctctgaacgcaggggtgtgtggctggtggcccccctcatcgccaggctgccaacatctgtgcagggaagagtgttgaaagccgctggggaagagctggagaaggggcagcacctgggttcctcttcaaagaaggaaagagataggcagaagcagaaaagtatgtctcttttgagccagcagcctttcctctcattggtccttacctgccttaaggggcaagatgagcaacgggaaggccttctaacatctctgcagaatcaagtcaatcagattttaagtaactggagggaagaaagataccaagatgatacgaaagcccgccagatgatgcatgaggccctacagctccgcctgaatctggtaggaggaatgtttgacacggtacagcggagcacgcaggggaccaccgactgggccctcctactcctccagataattacttcgggaactgttgacatgcacactaacaatgaattattcacaacggttcttgacatgctgggtgttttaatcaatggaaccctggcttctgacctatcaagtgcttcccccgggggatcagaagagaacaaacgtgcatacatgaacttagtaaagaaactgaaaaaagaactaggagacaagaggtcagaaagcattgacaaagttcgacagttgctgcctttgccaaagcagacctgcgatgtcatcacgtgtgaacccatgggttctttgatcgatacaaagggaaacaaaattgctggatttgactctattgataaaaaacaggcaagaggtctccaggtctctacgaagcagaaagtgtccccatgggacctgtttgagggtcagaagaacccagccccgctgtcctgggcctggttcggcactgtccgtgtggaccggaaggtgatcaagtatgaggagcagcagcacttccttctgtaccacacgcacaccatgcccaagccccgaagctactacctcgagccgctgcccctacctcctgaggaggaagaggaagaactcacgtctccagtttctcaggaaccagaaaggaaatcagctgagctgtcagatcaaggaaaagctacagctgatgaagagaagaagacaaagggaaggaagcgtaagacaaaatcgagctcacgcatcgataccatgccccagggctacacaatgtatggaacacagatgcctttgcaacaggcagctcagcagcagcctggtggcgtggtcctttcccccagctacaactccagggcctatccggctgcacattccagcccagcgctgatggaaagactccggcagcttcagcagcagccaagtggctacgtgcagcagcaggcctccccgtacctgcagcccgtagctggctctcagagactgaaccaccaggctctacagcagagccctctggtgggcgggggaattgacgctgtgctgactcccgcacatcccaacctcccctcggtgcccctgcctcaggacccaatgaggcccagacagcagcaagttcgacagcagcagagactcctccagatgcagcagccccagcaggccccccagccccagcagccctcacagacccagagtcaggcccttggtctccaagcaatgcagccccagcagcctttggtaaggcctggtgtttggaaccaggatgtgggtttctcctttagatttagcagttccccaggcaaggcttgcagcagacccagcaacagcaacagacagccgccctggtgcgacagctccaaaagcagctttctaggcttctgcaagagccacctggaggactgtgggagtctctcagaagcagctgcactcaaatttgttcccagtggcaaaatctttatccagattcttcatgaaggtacaacctataaccacgggaggccagaagaaccacggtggaatcggtccattttacttactgccagttttggtttaaaaaaaaaaataactgtccagtttaggttcttcagaacctcatgccaacttgagaaaaataaaataaaatctcacagctggccttagattccacagtgctcagacttgacatggtttccagagggttctggtagtcatcaaaggtatacttgctgttaattttgtatggtaagtatttacaattttgaatttaattattaatgttggtgtcagtcttggttgtgtattgcttctactgtatttataaaccggtgcaaaaagcacaagtaaagtaaattatacatcaaaatttattataaagaaatagtaactattttaactttgttcaagtatgtggtaatttgctcctattagagtgaaaaaatacagtaaattattatcagtttgt

SEQ ID NO: 792 - protein, 1250 aa, Mus musculus
DESSSHECNQRTILLYGVGKERDEARHQLKKITKDILKILNKKGTTESGVGDEGQKARKTKQEVFPTPENVFTKLQLLSYFDQHQVTSQISNNVLEQITSFASGTSYHLPLAHHIQLIFDLMEPALNINGLIDFAIQLLNELSVVEAELLLKSSSLAGSYTTGLCVCIVAVLRRYHSCLILNPDQTAQVFEGLCGVVKHVVNPSECSSPERCILAYLYDLYVSCSHLRSKFGDLFSACSKVKQTIYNNVMPANSNLRWDPDFMMDFIENPSARSINYSMLGKILNDNAANRYSFVCNTLMNVCMGHQDAGRINDIANFSSELTACCTVLSSEWLGVLKALCCSSNHVWGFNDVLCTVDVSDLSFHDSLATFIAILIARQCFSLEDVVQHVPSLLAAACGDADAEPGARMTCRLLLHLFRAPQACFFPQGTGDAKIGSNNVNTMKNEDFGMRGLRRDGNAEDAWATSQNSKSYGKSISIETANLREYARYVLRTICQQNLEQWTLRQSWLELQLMIKQCLKDPSSGSVAEMNNLLDNIAKATIEVFQQSADLNNNNSGMSLFNPNTIGSVDPSSTRQNGIKTFLSSSRGVWLVAPLIARLPTSVQGRVLKAAGEELEKGQHLGSSSKKERDRQKQKSMSLLSQQPFLSLVLTCLKGQDEQREGLLTSLQNQVNQILSNWREERYQDDTKARQMMHEALQLRLNLVGGMFDTVQRSTQGTTDWALLLLQIITSGTVDMHTNNELFTTVLDMLGVLINGTLASDLSSDGGSEENKRAYMNLVKKLKKELGDKRSESIDKVRQLLPLPKQTCDVITCEPMGSLIDTKGNKIAGFDSIDKKQRLQVSTKQKVSPWDLFEGQKNPAPLSWAWFGTVRVDRKVIKYEEQQHFLLYHTHTMPKPRSYYLEPLPLPPEEEEEELTSPVSQEPERKSAELSDQGKATADEEKKTKGRKRKTKSSSRIDTMPQGYTMYGTQMPLQQAAQQQPGGVVLSPSYNSRAYPAAHSSPALMERLRQLQQQPSGYVQQQDYLQPVAGSQRLNHQALQQSPLVGGGIDAVLTPAHPNLPSVPLPQDPMRPRQQQVRQQQRLLQMQQPQQAPQPQQPSQTQSQALGLQAMQPQQPLVRPGVWNQDVGFSFRFSSSPGKACSRPSNSNRQPPWCDSSKSSFLGFCKSHLEDCGSLSEAAALKFVPSGKIFIQILHEGTTYNHGRPEEPRWNRSILLTASFGLKKKITVQFRFFRTSCQLEKNKIKSHSWP

SEQ ID NO: 793 - DNA, 5077 bp, Mus musculus
gatgaatcttcaagtcatgaatgtaaccagcgcacaatccttctctatggagtcggaaaagagcgtgatgaagccaggcatcagctgaagaagattaccaaagatatcctcaaaatcctgaacaagaagggcaccacagaatcaggggttggggacgaaggacagaaagccaggaagaccaagcaggaagtttttccaaccccggaaaatgtgttcacgaaactccaactcctctcatacttcgatcagcatcaagtaacatctcagatctctaacaatgtgctggaacaaatcacaagctttgcgtctggaacatcctatcacctcccgttggctcaccatattcagctcatctttgatctcatggagccagcgctgaacatcaatgggctgattgactttgccatacagctgctgaatgaactgagtgtggtggaagcagagctcctcttgaagtcttctagcctggcaggaagttacactacaggactatgtgtctgcattgtggccgtgctcaggcggtaccatagttgcctgatcctaaatcctgatcagacagcccaggtgtttgaagggttgtgtggtgtggtgaagcacgttgtcaacccctcagaatgttcttccccagagagatgtatcttggcctacctctatgacctctacgtatcctgcagccacctcagaagtaaatttggagacctttttagtgcctgttcaaaagtaaagcagaccatatacaataatgtgatgcctgcaaattccaacttacgctgggatccagactttatgatggattttattgagaacccctcggcaagaagcatcaattattcaatgctgggcaagatcctcaatgacaatgctgccaaccggtacagctttgtgtgcaacaccctcatgaatgtgtgcatgggacaccaggatgccggccggataaatgacatagccaatttctcctctgagctaactgcctgctgtacagttctgagttcggagtggctgggggttctgaaggctctttgttgttcttcaaatcatgtgtggggatttaatgatgtcctctgcacggtggatgtgagtgacctttcattccatgattcattagctactttcattgctatcctgatagcacgacagtgtttctccctggaagatgtcgtgcaacacgtcgcacttccctctctcctagcagcagcttgtggagacgcggatgcagagcccggggcaaggatgacgtgccgcctcctgcttcacctcttcagagccccccaggcctgctttttccctcagggaacaggcgatgccaaaattggcagtaacaatgtcaacacgatgaagaatgaagacttcggcatgaggggtttacgacgtgatgggaatgctgaagatgcctgggccacctcgcagaactcaaaatcgtatgggaaaagtatttccatagaaactgccaatctcagagaatatgctagatacgtactgaggactatctgccagcagaatcttgagcagtggacgttgagacagtcctggctggagctccagctcatgatcaaacagtgcttgaaggaccctagctctggttctgtggccgaaatgaataatttgctggacaatatcgcaaaggcaacgatagaagtgttccagcaatctgcagacctaaataataatgcctccaattctggcatgagcctcttcaacccaaacactattggaagtgttgatccaagtagcacaagacagaatggaataaagacattcttaagttcctctgaacgcaggggtgtgtggctggtggcccccctcatcgccaggctgccaacatctgtgcagggaagagtgttgaaagccgctggggaagagctggagaaggggcagcacctgggttcctcttcaaagaaggaaagagataggcagaagcagaaaagtatgtctcttttgagccagcagcctttcctctcattggtccttacctgccttaaggggcaagatgagcaacgggaaggccttctaacatctctgcagaatcaagtcaatcagattttaagtaactggagggaagaaagataccaagatgatacgaaagcccgccagatgatgcatgaggccctacagctccgcctgaatctggtaggaggaatgtttgacacggtacagcggagcacgcaggggaccaccgactgggccctcctactcctccagataattacttcgggaactgttgacatgcacactaacaatgaattattcacaacggttcttgacatgctgggtgttttaatcaatggaaccctggcttctgacctatcaagtgcttcccccgggggatcagaagagaacaaacgtgcatacatgaacttagtaaagaaactgaaaaaagaactaggagacaagaggtcagaaagcattgacaaagttcgacagttgctgcctttgccaaagcagacctgcgatgtcatcacgtgtgaacccatgggttctttgatcgatacaaagggaaacaaaattgctggatttgactctattgataaaaaacaggcaagaggtctccaggtctctacgaagcagaaagtgtccccatgggacctgtttgagggtcagaagaacccagccccgctgtcctgggcctggttcggcactgtccgtgtggaccggaaggtgatcaagtatgaggagcagcagcacttccttctgtaccacacgcacaccatgcccaagccccgaagctactacctcgagccgctgcccctacctcctgaggaggaagaggaagaactcacgtctccagtttctcaggaaccagaaaggaaatcagctgagctgtcagatcaaggaaaagctacagctgatgaagagaagaagacaaagggaaggaagcgtaagacaaaatcgagctcacgcatcgataccatgccccagggctacacaatgtatggaacacagatgcctttgcaacaggcagctcagcagcagcctggtggcgtggtcctttcccccagctacaactccagggcctatccggctgcacattccagcccagcgctgatggaaagactccggcagcttcagcagcagccaagtggctacgtgcagcagcaggcctccccgtacctgcagcccgtagctggctctcagagttccccaggcaaggcttgcagcagacccagcaacagcaacagacagccgccctggtgcgacagctccaaaagcagctttctaggcttctgcaagagccacctggaggactgtgggagtctctcagaagcagctgcactcaaatttgttcccagtggcaaaatctttatccagattcttcatgaagctcaatattgtgaacagcagaacgagtgttagaactgcatagcatttgtttgcactttaaactttgcagaagttaatttattaatcattttgcacatgaaggctatggttattcctttgtcgttgtttgttttatttgttaagatgaggaaggtaaatcatgctaaagccctctagttctgagatgccgtgggggatgaggaaaaacctagagctctttgccctgcgcgttacaaggaaagcaactggaattttaaatttagttattatatttactgccacttaattctgcattctgagaggtttttttttttctttcatagcaaatgcatgtggttggcattaaaattgtcctaaggaaaaagctctattgcagaaccttgtcatttgctgggtgggttgcagataggaaattaaagaccagaccttgaaatctaatggaattgggtatacttaccatttctggctataagaaccccttaacatctgtgttatattgtaagctgaatctttagagggtggcatttcttgttttatgtaccctttttcatctaaaagtagagggagactactctacggtgggtatcatttgacctctggcagccatagagtaccaatgttaactggagtcagctcatgtctgaggtaggggccaaaagaaagtaggcattacggaaagtaggcatcaagttccagatgaatggcatgtgctaacaaagctcttggtcttagtgatctgggctaactgaatgacttttgcttttttaatttacaaggctcctttataaatagatgaaataaatttataagtagatgaaatttggacagaagccagagaaattattctagaaaaatcccagtctttagaataaaagaggtgaatcatatgatactcccacatatatttgggttaaattaaacatgtaatgttagtacggtgaaatatgaaaataaaacccaccatttaaatacagtgaaacttgattatatagaagcagttgtctagactcgtggaggaattctgccttagaaagtctgtcttcagaatggctctgaaccatgggtgcctgagcaaggctttaaagttataaggaagtgtcactgtacctgtagagcatttcaggatgacaggtgtggacaaatgtgaaacccgctttgcacttcccaatgtgtgagcattaggctgccctgtacatgtagaaaagctagcctgcatttgttttgtcttgtttggtttcatttttaacgcaggtattaaaacaatgggaactttcagtgtgaacaaatggtaaactattaatcataatcagaacagttctgcgcttgttttctgtaggttttatcaaaatgtttgtaaaccagtgacaaaatatttgtgcattgagattaacacgggctgcaaacctaatctttcacgttgtctccattcattctgtgtgcgatgtttgtaacattggtggaaaacagacacaaggcagctggcaactgttagcggaagaaaggtctttttactgaaaattcaggtgcattcgccatttgttaatttgtagcggatcattttctcttaatgttttttattatttgttggcaaaatcaaagtgccttaagttaagagtttgctttgaaatccatggaaactcggaatcagttcacagtgcatttatttacaagtctcactgcatgtccattgtaaatttaatactgtaaatgtattcggattcatttacatgcctatggctgcctttgattaaacttcttc

SEQ ID NO: 794 - protein, 1104 aa, Mus musculus
DESSSHECNQRTILLYGVGKERDEARHQLKKITKDILKILNKKGTTESGVGDEGQKARKTKQEVFPTPENVFTKLQLLSYFDQHQVTSQISNNVLEQITSFASGTSYHLPLAHHIQLIFDLMEPALNINGLIDFAIQLLNELSVVEAELLLKSSSLAGSYTTGLCVCIVAVLRRYHSCLILNPDQTAQVFEGLCGVVKHVVNPSECSSPERCILAYLYDLYVSCSHLRSKFGDLFSACSKVKQTIYNNVMPANSNLRWDPDFMMDFIENPSARSINYSMLGKILNDNAANRYSFVCNTLMNVCMGHQDAGRINDIANFSSELTACCTVLSSEWLGVLKALCCSSNHVWGFNDVLCTVDVSDLSFHDSLATFIAILIARQCFSLEDVVQHVPSLLAAACGDADAEPGARMTCRLLLHLFRAPQACFFPQGTGDAKIGSNNVNTMKNEDFGMRGLRRDGNAEDAWATSQNSKSYGKSISIETANLREYARYVLRTICQQNLEQWTLRQSWLELQLMIKQCLKDPSSGSVAEMNNLLDNIAKATIEVFQQSADLNNNNSGMSLFNPNTIGSVDPSSTRQNGIKTFLSSSRGVWLVAPLIARLPTSVQGRVLKAAGEELEKGQHLGSSSKKERDRQKQKSMSLLSQQPFLSLVLTCLKGQDEQREGLLTSLQNQVNQILSNWREERYQDDTKARQMMHEALQLRLNLVGGMFDTVQRSTQGTTDWALLLLQIITSGTVDMHTNNELFTTVLDMLGVLINGTLASDLSSDGGSEENKRAYMNLVKKLKKELGDKRSESIDKVRQLLPLPKQTCDVITCEPMGSLIDTKGNKIAGFDSIDKKQRLQVSTKQKVSPWDLFEGQKNPAPLSWAWFGTVRVDRKVIKYEEQQHFLLYHTHTMPKPRSYYLEPLPLPPEEEEEELTSPVSQEPERKSAELSDQGKATADEEKKTKGRKRKTKSSSRIDTMPQGYTMYGTQMPLQQAAQQQPGGVVLSPSYNSRAYPAAHSSPALMERLRQLQQQPSGYVQQQDYLQPVAGSQSSPGKACSRPSNSNRQPPWCDSSKSSFLGFCKSHLEDCGSLSEAAALKFVPSGKIFIQILHEAQYCEQQNEC

SEQ ID NO: 795 - DNA, 109661 bp, Homo sapiens
  misc_feature (1)...(109661): n = A,T,C or G
attatggaaggaaaacgattaagaatcatgttgtcacagtatggcttcaattttcagcatctcctcacctatttagcgctttaaaataatgctaaacaaaacctaatgttttccaatacaagatcactgattttaacctttcctgctactgctgtgtggtcttagttcatccctgaccgttttggaaattcgacttagtgaatatacattttgtgtagtctgtaagatatttaacaagtattcttgacattgagaatttcagctccctttatctgtatttaaatctcattttatacttgaggcaaagtaactaagaccatttatattttatttctatgctttgtataatttttcttaataaagaggctaattaacaattgtctctgacatcactaattagacttctattttaattataatttttattccaaatacatgcttgcattgatagttattaaggtttacaattttaagagaaacttggaaaaaatgtacacacatatcagagtgtaaatacatatatttgtcaagtacttgtagaaataacattacctgataactgttgattctggagggtttgaatgtatccagtaagtagtagttattgcaacctgcagagtggcatctggtattttccttttaatgtcttagtttagttgccaaacctctttgtgatagaggatttcctgagttttcgtcagtaaagtcttgagtgctctagagagaaatagaaggagagaaaaagagggcttcacaatcagagattgtcttcaaacactggactcaaagctatgcagacactgaatttctatctgtcctcttttaggacttctgcttttatttcccaggaaatgtgggatgaggatggctgagaagtcatcttttaaaaagcaatttaaaatcttgcggctttttactgaaacctgctatagagttgatgatttataacttcgagttatggttattttctatgcaaatgataaatccaagttgagatcaagccttcgaagtctgcttcctggagaagattttaagcttgctttcttgggtggttaatttatctgaaatatattgtgtacaacactgggtgatgtattttcttctaacaagtaattatgttaactcaaaatgcgtgctggctagggatgttaagtctctggccctttgtttttcccttggttaataatgtcattattttaaacctgtgtttgattaactcctttgtaggtgaaacagcttccttctattataaattagcagattccaaaattacattagagaagtgattgtatccattgccaggcttattatatactgtgtcgttcatgcttttcttgaatagaatttaaatataaacaatttttttttgtttctttacctaactttgagtttttgggaaaatataacattaaattaaggcatccttgtatcacaattatttacagttgtttaactttgaaaccagaagggcaaaaaatatgttaggggtgagattgaagggcaaagtgttttgctgctttaactttttttttttaattttattattattatacgttaagttttagggtacatgtgcacaatgtgcaggttagttacatatgtatacatgtgccatgctggtgtgctacacccattaactcgtcatttagcattaggtatatctcctaaagctatccctcccccatccccccaccccacaacagtccccagagtgtagtgtttcccttcctgtgtccatgtgttctcattgttcagttcccacctatgagtgagaatatgtggtgtttggttttttgttcttgcgatagtttactgagaatgatgatttctaatttcatccatgtccctacaaaggacatgaactcatcattttttatggctgcatagtattccatggtgtatatgtgccacattttcttaatccagtctatcattgttggacttttgggttggttccaagtctttgctattatgaatagtgccgcaataaacatacgtgtgcatgtgtctttatagcagcatgacttataatcctttgggtatatacccagtaatgggatggctgggttaaatggtatttctagttctagatcactgaggaatcaccacactgacttccacaatggttgaactagtttatagtcccaccaacagtgtaaaagtgttcctatttctccacatcctctccaacacctgtgctgctttaactttatgtaaatattgctttgcagaaacacacctccctggtgtctcaaactgcagtgtccttctgttatcagtgggaatcatttgtgttggtgcctttgctgtgaacacgttttggttttatcttctgcgttttgagtatttgtctatgtctttacatgttaaatatcttcattggttttcacagtgcagagcagcagctctgcatcacttgggaacttgctagaaatgcacatttttgggcaccaatctagctgagtgaatcaaaaactctggggtgccccaccctgcatctgtattttagtgagccttccattgatgcttggtacactcaaatgtgaggaccactgatttaaatggaataagaattttgttgccatttagaacttgaagctattaatatcagtcacttcagacacataataatccccaaatgttggtcatcttaaagggattagtttgatattaaactcttggaaagggttgtattgttatttttaaatatgactattgtaaacaaatcttagccttccttatttgttggagtctcaaaattttaaaaagagcttttatgctgtatgtacttcaaataataattgtcaatatttaatttcttacactgtcatggattaactcactttattaataatctcaactattctctgaagtacgcgtatcatcctcattctctggatgaggggaactgaagagcagagcagtgaagttagatggagaccccattctgacctgtgctgtctagttagccttagaatctgtatttgtgtatttctgtacctgagaatctttccctatcacaccctctcctcaacccctctcccactaagaggccccagtagtgagaagtgaatctcgtgtgggatggttgtacgtctttcaataaaataaggaccatactctcctttacagcaaattgtaaatgctaaaggatgtttatgatgctttttctaagaccatcaaatgaaacaaggcttattcaagaaaatgattatttttaacaaatcaatctgccatattactaattcagaatacttaagtcatactaccttattgagaatttatatttctaaacctctagaagggctaacagtagagatttgagggataaaagaagggcttcagttcttgatctaaattaactttatttttcctctgatttttaactcacaaccacatacctatttacaaaccacctctgataacattttttcattggaggaagactgccagttagaccacttaatgctgaaagtgactaaaatctttaagtgaaaagtatctcagttacagaagtatattttcatatgaatagaagcagagcaagttatagatactttaatctctcattagtaaataacatcaacacatacagtttgtagttatttgtgttagtgttgggaacagagctaactttggttggtttggttattttgtacaattgagatgagttagaaaaatgaacagaatttttacttttaagtggcttaactggtttgtttattttaccaagtctactaaaggtagtctgctcatctgaaaatgtttgcttcaaatgggattactctgaaacctgtagtcttttggaactgggcaggaggatagagatataattatgacatttgatagctcttaggctgttttagttccagtggtctctggttctaaatgtggtcattttgacattaatattttgtttgagggtgtgtattttaaagcagtgcatagtcatgtctgctagcttggctttatccattggaatatagaaatttaggttagataccaacaggttccaaaagtaacgagtcttgggcattgaaatatttcgcaaaaatgaatgccgtcttttgtgacctagttatctgacatcccagtcttaagtgttctgcttgcaagaagaggactagtagatatataaatatcagtcatactgtggactataagctgtgtagaacaaagatttaatatacaaatgtagttaaatccgcctcctattttcttgatttacagaaaatatactctatgtatagttactaatgattaaaaaaaaacctgttaatttcttcattcctgtaacagtttcctcatccatgtgcacacccattcttcctcccaggctcgaagcttattcctgatggaacatttatatgaacttgttttattctaaacaaaatagcatggtatattgaaagatacagctgaaagaaatagtgttttaaggcatcttttaagagttatttaataagctaaaaattttaactaaatgcatttattgtttctaaagactggtttttactgcttttcttagagacgtgataggttgctatgtgcagtttacttccggatatatactggatttgcatttgaagtagagcatgcaaaaattaggaagtactgggaagtatgaagtgccatattttgtcttatcagaaggacaattacatccacttcatctgtttttattagtgtttggaagaaaggaagcgcattctgagtgagatctttttcatttttccttaaggacattagtaatttaaaaattctatgataattgaatcattgttgaaatatcagaaaatgtgagtaaggtgaaaggataatacacagctctgatcatcttaccatcattatgacatctttgtcaacacatacacattttggcaaaatttctaatcagttattttaaagaaataaagatgaattagagcagacctcaattcctttaactccatttcttctttctaaggacatttggctcaagagacatattttaattcgcgtagtacaacaagcctaccagggttttgggcatgcatgtttctagtttcttcatctattaagtttctgtgagtatgagataatatctggagaaagaaagtaattgatctaaaggacgagatttttagaacttagtttacatgggagatgacacattcaattcaatagcagcaggtggactaggataaaagaggtagcctgacgtctcctgtaacagactctccagttgatgcttttccttgtccaacaactgtatccttgagggaataaacaagagtaatttttgggtgtttatctcagattattaatattacttacaactgtgcaacttgagggcgtttaaacaccaagttgaaagagcagaaatcgttgatacttttgaaaatatttggtatattttcttaggttgactttattctcatttgttatgaattgctatttgaaggcttctacgttttctttcttttttctttttctttttttttttttttttgagaccaagttttgctcttgtcacccaggctggagtgcaatggcaccatctcggctcactgcaacctctgcctcccaggttcaagcaattttcctgcctcagcctcccgagtagctgaaattataggcacctgccaccacgcctggctagtttttgtatttttagtagagatggagttttcccatgttggccaggctggtctcgaactcatgacctcaggtgatcctccacctcagcctcccaaagtgctgggattatagatgtgagccaccatgcccagcctacattttctacttgtatgaaaaactgatgtaaacaaatcttgtaggctcttgaaaaatagtagcttctaaaatgcctctgcctgtcctatttgaagactactgtagtaacacctagcatgagttccctgaaaatattaatgctaagaaaggaatactgtctttacaccccttatagaggttgagcagtgattcttttccagctcactacgtgctgcttttgctttcagttttatccctgcattctcaactcatgactttgttccttggcccaactccctgagcatatcaaggccaaggaatgatttgagcttcttaagtgtcttcttcacctcaaaatgtctttttattttcactaattttctttttttcccgatggtcaagtagaaagatgttcctttctttctttccatattaatccagctaagaggccattgtctcttatatcctttatcatcagttatctgttccccaatcttgatttctactatggaaatttgtttatttgaaagataggtctgaaacaagagtcttttgatgatcttcataacgctctttcctctcaagctgttgttcttcatgcccaactcctggtaaatgtgggtcacttccctatcttcaccatttcatcatcacctcttactttaaccgcttgtttcctagctttgtgccctgccacttagagaaacttcttctcctttgaggttcacacatggtttgtcagtaaacaagaagtcacatccattgtgacttcttaacctcactggacgttgtcagtgacactctttcttatgtatcccctcccctgacttgtgtgaccctgaattatagtatcttgttaattaaggagcatgtatgtgcaccatttgctggcttatttctcccctcaccatctcagctctcttagcccttcttccctaaacataatgtgaaggttttgcacccctcccaggacttgacatactgcccttattcctgagctgtcacctctgtgttagggcccatatcaaaccaattactggacatttacacatttctacctacccttcaaattccttgcaattacatgtaaattcaaaagttccctgctgttataatgtattaattttttatacattgtaaatagattaataataattacttggtaatataaacaatactatttattagtatacattataaataattttaactagtggatacatcttgaagtccagtgagatgcacatttactccttgggttcaaaagcctgatcctttcctaacttcttagatacctcttcattttgcttcttagtcttcattcccaccactaaaacttagttcaccctacaaacttttttactctagctttgtctctcacatctccccttcatttttctcaacacttaatcatcaggtaaagtttcctacaaaactaatttttctccttatcttcacctctgccctattcctttagctatatatttgttcattagtctgcttattttgtatttagtatgttcaacaaatattagatgctaattcattgcctattaaggagattataaaaatgaacaaaacagacatggagtcttccacaaaatttacacactaatgaggaagacagacattaaacaaatacctagaaaataagtgaattatactgtaataaatgctccaaagtctacttcccctccttctgtggggaggttttcaataaactggagtgacagagtgagggaactgacactgtatttgtacatagcatttcagcaagtgaaatcgtggctatgagagtattttaggtgtaaggacgagcaacagcaaagggaggaagtgccctggagtcttggtgaaatgttgagtaaggcagttcggtgtgggtgtgggggatgtgcggaggaggaggggaagtctagcatgtgaattaacagtagtgaacactgtccattatacttcgaagcattttacacgctttatcccaggttttctcacaaaaaccttacaaggaagcgatgttaccccatttttcagaggaagaattagaggtttagaaaggtttattattcgagatcatggacttggcaagtggcacaaccagtatgcagtcacagctctcttaccccaagcttgggctattatcagtaaatttggagccatagtgatcctgtgcgatgtgaggagcacgtggctctttctaggatgctttccttcaccacccctctttggacttctaggtctgtaaatactactttgatgacattgaatctgtgctccttgaagacaggaatcattcatccttgtattttttcagggctcctagcattttgtcttgcctcaaatagatattctataaacagttactgaataactatgctacagtcatcagccttcacatggacatttacattaggaccatctgatatgccttaactgaaaacaattgccaaagcatgtgactggcactgccttcatttttcataattttattagtgcccccctgtttccttcctagggttcatatgtacacaaaccaccagaccaaaaaaaaaaaaaaaaaaaaaaagaaaaaagaaatatatcagtaattctctgtagcaacaacgaaaatgggaaattagcaagcagctcagctcattcagatgcgcagccagctctagggatcactgcttatgtcatttgtatcctatgattaggaatatcttttgaaaatttgggagaggtactcaggatattaaataagaacagcttctaagagaaactcgctcctagcttcttttttttttttttggaggcaaatttgaacacctgaaacattaagaatcatttgggggtggggaatagatagattggcagggcatataaatgtttatttcttgtaatgtataataaaaaaggaaccagtgcaatgggaagcagtggcaagtgtgtccctgagaaagacagaccgacacaaagactgagagccaagtaacagaattggagagagaaaaacaggcgcttagtttaacgctacagaagcaatatgctactttgtgcagagtacacatgtgaagtactccaggtcaaacattggacttctcctagtctgaggtttttgttctttgttgctgccactgctaattaggaacacagtgcagtttgttttctctgtgaggaattcttttctcatataagctccttaggataagatggatgctgttgggaagggtaagtgcttgccatgggcaaaaatatacatagagtaagaaaaggaggtttaccaaaggatagatttggacattttctaagaaaatggaagattataagatccaagagagaaattgctatagaaagattcagagccaggcacaagagagggcacatcttggactctgttactttggctgaggaatgtgttcagtggtgtgcatatgctttcgttatgctgtgactaaatttctttcccacgtggggaaaaaaatggtgcttggattcactgtgcctatggggtggtggtggagaggtggtccagaagggaagagtggtgatgtcagaacatgtttgcattttcagctgtttgcctcacacctaatgacacctacacgctttattgttttgtcttttggaaataaatatacatgtatctcacacagtcatgttggaaataaatggaatatatatagttttgtagagatgaagtcttgctcttttccaggctggtcttgagctcctgtcctcaagagatcctcccaccttggcctcccaaagcactgggattacagacaggagccactgcaccctgtccaggaatattttttataaaggtgtttgaggatcctagcaagatatttttccctaaatgtaaatatttactattgctatatataaaaccaggcttatgaagagataacattttccttaagggaaaaatatgactagacaatatgttacatgatgtgaaattaataccatgttcaattttaaacaatgaaaagtttttcaatagccaaaacttactttgtagggtacgcccacatcaagtgcttctattaagacttcaggtcagttgacacttttttttttttttttataatgttagcaagttccaaactggaaaaacaagggtgttgccagtggaggttgaggtgaattgaagggagggcgggatgccaccaccgcaagccagcatggaggtgctgtggtcagtgcatttcagggatatgaaatgcaaccccacccctgcagacaagagtttcagaatgcattttctgtttttcaggatgaatcttcaagtcatgaatgtaaccagcgcacaatccttctctatggagtcggcaaagagcgtgatgaagcaaggcatcagctgaagaagattaccaaagatatcctgaaaattctaaataagaagagcaccacagagacagggggtaaagaaccttaatgcatttgctcccattgtgttgccttttgccttccctctgagcacagtctttatcaaagtgttctatgtcactgtcaacagagcgtttcccctcctgaatgactctcacattgaaatgtgaacaagcacatttaaattttaaagccttgtttccatttatagcaacccttgtattaaaatattaatacaaggtattaatattaaatattattttattaaaatattgtattccataggtaggtgtaggtaatttattctgatttttggtatacttctcaaattttctatagtagtaataaatgaagtactgaagaatgagttgaaaacctttagtctggaagagatccatttctctgtttctttaccataattttccaagcttgtggttagttttttttctggggcactcacatttgcatgttaattgaaaatcatgacagcatatttgctcaccttttcttgcattattgagaaaaatgattgcagtaggtagtgatggctacctatatctccaaatgatttcaaataaaagaatttgatctttgctctataatgtcttctttagttgaaatgctctttcctcatccttttgacatagtttttacagtgaagctgtgcctttatgttgtatcaccacattgcataattggaattttgtaattatccacttcacgtttgcctaattattcttttcaaggtttgtttatttcattaggcaatcaaattattttaaatatataattaggtatcctgctaccaccactggtgtttatttctctaatacttaaatcatagaaggaaaaagaaagtttgtgtttactctatgtaaacaacattcttcctgcacgtggtataaaccacctctaggagccctactgttctgtagtacatatacttttttatggactcttcacaggagatccagttcctagactttagcaggataaattgctagaatttgtccaccctagatctttactagagaaaaatacagatcttaataatgaagataggttctctttcttcccggtcaatcatggtgcacatgcagaaacatggtacaagaggcagtgtgtttctatctgcatatggcattctgggtatctgatgtcagaggtgatagtcctcagaacacagtgggaaagttatccttcctgttattcacatcaccttccctaactcccttccattcccagttaagggctttgaaatacctcagctctctgaggaagcaaccaagagttgtggaagggaaatgaaaccttcttgttgatgtgtcattattgagtttgaaaaaagaaagtgctctgtctaagaaaactgtttatctgttgttttggtgttttctctgtcttagagaaaagaggaaacagttgcatttagaagattgaatttagaagccctgaaactagctagcaaagaatatttaaaactacttttggtatacttggcaatggggtaggggggagtcagtatttccttcaggaggttcgtaatacatattttatctaaattatttttagagggtctttccagagcctatggaactttttagaaggcttgaggggtatgggaaggggaaggaagcaatgtggtatccttttctgttgagcgtactaacttccttcacagctttttaatgccacactatagtttgtcctgtctttgtagcagtccctcaaataggcaattctagcatatgaactcacaaagcgaaaaacattgttgttctgtgctgccttttgagaaacaggtgaggtattccttatacgaagtgcttgggaccagaagggttttggattttggatagtttcacatttttgaatatttgcatatataatgagaaatcttggggatgagacccaagtctaaacatgaaactcatttatgtttcatatacactttatatacataccctgaaggtaattttatttttctcttggggatgcttaataaactgtgttgtgtgtctacattttgactgtgacctgttatgtgagatcaagtgtggaattttctacttgtgacattatgtctgcactcaaagtttcatattttggagaatttcagattttggattctcagaatagggatcctcaacctttttcagtaaatagaaacatcatctgtggaaccacatcgttgggaggggatttttgactttctttcattttagataaagttccttaaccagaaagctgttaatttgggatgtagtgagctgctgtattgtaaataatcttaattttaagtcactagttaaaacttagtgtaagcaccagaaattagctaactgtacttcatattaatggaaatatgcccacttttttcagcaacatgagtactggtaaggaaaacagaccttgtgttagcatgtatttgatttctgggaacacatgaaaataatattttgaggaaccaactcattaggagtgttgtcagatcagccaggtcttgcctaggggaatttatagtataaagtttaaataacatttccagttgaatgatcaaagttcatttttcatttgccttgaccagttatcttttttggttgtcaatggtgtatcttttgaaaatattagtgaagtttactatgacaacctttaagaggctaaagtttcaggacttaaagatttttaaaaaagaaaatcaaaattaagcaacaaaagagcaataatatgttataaaagcaaattaacataagaaagatgaggaaaaatatatattgactataatgttactcatgtaaatatcattaaaataaagtatttcgttgagaatcaccactgatttcttacattttgctgttaaaatgagtataaattgctaagaaccaattacattcttttacatgaagttttaagaagttagtgatacatagataaatggagtccattaacacaaacaaataaaaaggtgcacttgggagtttttagtaggatctacttctttaagtctgttgttattatttgttttgtcccaggaagaactgaatcaatgcattaatttcacttttaaggcattttgtgcacaagactattgatgttagctcttcagccttggatcaaagatgttagtaaatgaaaaattcaaaacttggttattttaaacatgctcatgacatgtgagcagctacagtgaaggcaaaatttcatacataatttgtacttttgagaatagacattgaaaaaataagcaggtttaatgaatttgttagttcctaatctttgcattatatttggtgttactggccaaaagtggcacaagcttgtaacttatgttaccccagcacctttaaattctgatgtactctagcatcaaggtttctttgttagggaattagaaaagaaccagccttgtggtgttttgttttattttgtttttgactgtaaccactaattgcttattgttgaaagagaagtctcttttattttcatgttattgtttaagaccattacatttgccattagcaaaatatttttgagttcagtgaaatcttgttcatttcttgtgtctttaatagagaaatctgtaaagtaacctttgttctctgaaattaaactttcctaaagaagacgacagtgtgaggagtagaactcttgtcttggtagcctttaactacttagaatcacagtgctggccgggcgcggtggctcacgcctgtaatcccaacactttgggaggccgaggcgggcggatcacgaggtcaggagatcgagaccatcccggctaacacggtgaaaccctgtctctactaaaaatacaaaaaattagccgggcgtagtggcgggcgcctgtagtcccagctacttgggaggctgaggcaggagaatggcgtgaacccgggaagcggagcttgcagtgagccgagatcccgccactgcactccagcctgggcgacagagcgagactccgtctcaaaaaaaaaaaaaaaaaaaaaaagaatcacagtgctagaaatgacattatcaatcatatatccaacttttcctttttgtttttagatttgtctttgtaaacataaaatattaaagtatttaaaagcaggattgaagctagctttggattttattgttagaacagttaagaagagtacccctagaataagcaatgcttattttttttaattggaattttcttcaaacctctttatgctaatttgataaacatgtcacttcttcattaatgtggaatgatttaattttttgccactattaaaaaaggaatcatgtaatttcttttttaaaaaatatattaaactgtgtcagaaaagtaacaagatgagtctccaaagaagatgccaagcaagtgtttgattaagtcaaagtgagcccaggagatctccccaccttcattgtggatatcattgtaatttaaaagttgtttagtgagaaatgtttataaaggcactttttatgatagctaaaatctggaaactactcactagaatggttaagtaaatggtggtacagtaacacattggaatactgtaaataagtgagaattattagtttttagaacacattaaaattacctcagcaacatgaatcaatcttaaaagcatactgttgattgcaagatgccagatgtggaaagcatatactatatgatttcctttatatataaagttccagtgtaggcaatagcaatctaagttgttaggtgtcaggattttgatctcctagggagggagacatgcctagagaggcctgagggagtttctgagattccattctgttactttgcattcaagtcttattgtgtatttattttattgaaattcatagaatttgtgcacttttctgtatgtatgctatactttaaaaaaaagtatccattaaaaatgtcgagagcttctattaaatggaaaataatggatctgctttatgtttatgtagttggggacgaaggacaaaaagccaggaagaacaaacaggagacatttccaacactggagactgtgttcactaaactccagctcctttcatattttgatcaacatcaagtgacatctcaggtagctatttaaagctgtttattatgcatttgcagtattctaatttacttaaaaatttttttcatgcagtatattttctcaaccttaatggttttagacatatattttataaacatacttggaagtatctcagactattgagtagttcttttaagtgtcaggttgccttcctcgaaggattaatttttattatgtactttttttgtccttatgataataatcggtgacatataaagtaatagctaatgaaatagttaggttattagagtttggtcctatattgcaattgatgagaaatctgttgatgattgaaataaaatactacgacattgagaagaaaacacatctgttttgctttacaaatccattgatattcaaatggttgtgtctaaaaattaatatttgtagttgttctaccattagaatacttaagatttaggtctgaatgacaactttttgtattttttaaaattgtagttatgaagaaatcattttctttgtacatagttttatagtttctatagaaacacgttttgactttcgtcaaagtagaatcatgtatagattcaactgtcttaaaaagtaaaaatgatttatcttagtaaaagattatttagaatattggtcttacaatatttttgtttttatttgcacagatttctaacaatgtgctagaacaaatcacaagctttgcgtcaggaacatcctatcatctccctttggctcaccacattcagctcatctttgatctcatggagccagcactgaacatcaacggactaattgacttcgcaatacaggtgtcaaagagaccatgtttctcttacttttaggaaagcaaatccaccaggcattgtgcaatttaaagtgagccaattagctgggcacagtggcttgtgcttgtaatcctggcactttgggaggccgaggtaggaggattgcttgaatctaggagttttagaccagcctgggcaacttagtgagaccccatctccacaaaaaatttaaaaattagctggttgcatgcctgtagtcccagctacttgggaggctgaggcaggagactcacttaagcccaggaggtcaaggatgcaataagccatgatcatacaactgcactcaagcctatgggacagtgcaaggccctgtctcaaaaataaataaataaataaaatttaaaaaataaaaatcaatgaaccaattgctgtacattaacatcattttagggacatagtacaattttgaataatttagacattgtgaattaacagtcttaaactaacattttatttaaagttgtgttcatagttttcaattaaataattatcattggtgccaaaatatataccatttaaaaatgtgagagttttgagtgtttcttctgtttttttttgttgttgttgttgtttttcttttggtctttgttattttcctgaagcaaagatgaaagtttatttgctctttataatagagcatgttttaggttaagagccagaacaaaccttatgatttgatttgccccactgtgttatttcttatgcacatttgagttcattatttccttctgctattagcaaacagaaataagacttggtttcctttgtttattttataggagatattaactttgttaatgaaaagaaaagccaaataactttcattttattaaaaagacaaaggggagaaaagtgaggggtggggttttctaaaattatacagtccaggaccttgcactgccctgaagtttcagtaccttatttcagcactgggtacttcctaattgtatacatcctgatgtctagacagaagaacaactctataaattggaaaaggattaaaaattttaaaaaagttaaatttagggaatgtatttgtagtgtaatgactcagtatatctatggtttataaaaataaatgttttctctatttgttttggcacctacatgtttattcagtcttttctcctgttacagttactaaatgaactgagtgttgtggaagctgaactgctcctaaaatcctccagcctggcaggaagttatacaacaggactgtgtgtctgcatcgtggctgttctcaggcgctatcacagttgtctaatcttgaatcctgatcagacagcccaggtgtttgaagggttggtatatagcatgtcattgttgtttttccaatctcagaatgtataactagtgatgaaatattatagtggctttaaaagaaaaatagtactgatacctgttttagttaaaacatggttaaagaacactcttgccagaaaacatcgatcaaaaaggtctaagcatgtaaagtatgttctttctaataatgtgtgattccttcttcccttcctccttgcctttcttccctctccctggtttctaagtacaaagctagtcatttatagcactctacggttaatgttggccagcatcctggcatattatgaatagtgaatgctgtaacttctttattcatgtaatttcagtttatgtttgcagactcaacatcaaataagctttgcatacattatcatcttagaaatttggttcttcaattgcatttctttgattaaagatatcttttgataagaattaacctagaacaaattacttcattttcagttgtaggctggggcttactctactaatgaagttgagctacagaattagctaataccacccccattaaagactgaggctaaggcaccaaattagtgtaaatgagctctcaaaaacttacataagctgctttttatccactctccagggctttttatttaaacacagaaagacaacctgttatttctttctcttcagtttttccttctgagctcaaaagaatcatggggttctttggttttatagtaccttttatttttttaatctagcacatgtaatcaatttatatgctatcctagaatgatatcaatttaacagtagctattctgggaaagaggaaatgctacctttatttgtattaattacatgttatgaaatgaaatctgaaacatcctaaaaacatcagaatgtaagaatatttacatattagaattcaggaaatagagaattatttaataactcaactactgtataaagtttgaatttagtattattttacagcccaggaaattgagattcaggcctgttaagtgtttggtgaagtgatgtaccctatatcacatagctaataaatctcacagattttaataaaaatctttcgaactggaagcttattcatgctgtttaatctatgttctacttttaaaatagtatattgaaacccattagttggtcatgaaatgaatttaatgggttgtgacaagtttttttgtttttgttttttgtttttaatattgttattttgaaattgatttcagtatcatttagtttggccttgaaaatttttatcctgttaaatattcataaaatcatatttgacattaactttgttgtatttttaccttatattagtaagggtaagtattatgcttaaaactattatttcacttcttcgtacttatgtgaacagtacactggattacgatgtgaaatgtttttcttattgcttgcaaatcaaagaagttgaggaaacactgactactatacgatggatacctaaacctaacagactctgaataaatgtttatttactttagtcacaaaataatttttcgctttatagataatatcaggattttgtttaacttttattttagagcagatttattacaggtttattacaaaggtatattgcttggtgctgaggtttcaggttatgattgaaaccatcaggaagtgagcatagtactcagtaggtagttttgcagacctttcctctgctctctgtctccccacttcagtagtccccagtgtctgttgttctcatccttatgtccacgtgtacctcatgcttagctcccacttacagtgagaatatgtgcttggctttctgtttctgcattagtttgcttaggataatggcctgcagctacatctatattgctgcaaagagcatgattttgttcttttttatggctgcatagtttttggtttgcttgtttatatagttaacaggttgaatcattacttttcttcttaattgtgtgacacttttgttctaattggcagcttttacctgctgctaggtagtcccatctgttgatgtcatttcacagggtttgggatactacattgccatttcctcaagaagtctccttggttccacctatggtacctgtgattccattgtcctccttggcctagacatcctatgttctctccactttgccctttcccctgaatagtacagaggagtttgatctgggagtctggaaacctaagctgttgtcttgcttctgctagaactagctctttgcctttgagcaagtcaccccacctttctgcctctcagagcctcctttatacaataaggatggtgaatcagatagtttctaaagcttttttcgtctttaataatctgtcatctgtgactccgttagtgtaatataatggctgagccctgtaacaaaatacaagatggtgatggaatcagatgcacagataggtgaatggaccacaagtgtttacagctgtggtgtatggacttctgtgttgtatggactgtggacaaagaggcctataactacaggagttatacagaatattacaaaacagaaggggctttatcttcttatataagataaactaaaataaatttattactagttggtatacataggggaatgtatacatgcataaggggaatgtgactccaaaccatgaactgcttatgcacttgaaaatgggttttccagattgactgctttgaagcattgctcctttacaaaggagaaaacttgggaatctttgcacgctgatggaatttgtgaatctgcggaggcaggggctctctacaacagttttccttttgtgtctcagtcccagcaacttaatcggtggattcctccatacgtaccttctttatgaaggaatttctttcattgcttttgtttcttgtcatcagtgacatttctgaagttttttttaaaatctatttcagtgtcataatagaaaaattatattgtactgagttatttactattctatttattagtttcaacaatccaatatcctttttcttacccaagtgatacatattttcattctaaaagagtcaaatgataacccacatagtacaaatctatgtcttatttcttcgtatatttttctcctcaggttgtgtggtgtggtcaagcatgtcgtaaacccctcagaatgttcttcccctgaaagatgcattttagcctacctctatgatctctatgtgtcatgtagccacctcagaagtaaatttggagacctcttcaggtgagtagaagagactcaaaaggacagaaataggatcatgcctatgtttgttagtgaccctgacaatattgtcatccttttgaataatgaaagctaattgcaattgtatctattaggcagtaattttgatatactcatgatttgtttaaactgaatattaaaatagacagggacaatacacgatagtctattacacaatgtaaatgtgtgatcataggttttttttcccccaatattgaaatgatgttaggtctgattttatttcttcaataaataaagtatttcttaagattttacattttctatatgttgtacagacagtgcattttaagtaagtcctactgaagtaatgattatttgatatatctttccattttaagtttaaaattcaatttggattataaatctaatagaaagatcaatgaggcagctctttgtattttgctttatttgtatccctcttgattttgatatctaccttttctgagctgactttttgcattacttggattagctttaatatcctttgggcattacagtgtttcattttttatttcctggtgactcatagaaggttctatagccccattcacttttctagaactttttcagactgtgtttacttttcctcttttttcacaaaaacaattttgctgtttagcaggtaactttttcatgtgttaatgagtttttttaaaatgaccagtaccctcactgaataacattaaatcaatgtgcattaaaagtaggaaacctggtttctattacagattgtattagattcaggttcagcttgataaatgctatctaatgtttcctggtatgaaaaaaatagaactgaattaatcataaaaaggtactgtaaattctgcagttaacctacttgctatcttagacttaaaattcatgacctgataatgatagtagtatttgattcctgtcaatacatcttattgctgaaggaatattttattgtttaatgagtccagaaagttgtatttttataaatatttttattttcttaatactcttatccagaattcgtattgaattatttttggctgtagctataacctttattacaaattactgtaagtgtgagagacaatattctgtgctttgctcttgaaatcaccccactcagaacattctttcagagctatttgcatgctgacttcttcactccgtttgtctttctgcttccatggccattcctacttcaaatagcatccccaacttcctgtcattcgttgtatcttagcacttgctacccccacaggcagcactagggctggaaagtaaatgcttatttaatgttattttgaggacaattatttactatagatgggtaggaggagagtggtagaaggtaatagctaagaaaacaaatttggaatccagaaggaggtagggaaaggatgttcaactaccattttttttcctttgtcatacctcgtatccagtttgtaaattctgtgatctctgccttccaagcatctctagaacctgcccattcttcaccctctctttaccgctgtggatacctctgcttggaccattgcagagttcttctaactggtttccttgcttccacccttaactctaaaacacattttcaacatccactaaagtgatccttttaatatacgaatgattcacaggctttcagtgattttccacccactcagaataaaattcaccatccctacctagccttcaagatctgcagggtcccatcttctcttccacccctttccctctgtttattgtggccacacagacctctttactgatcaaacactctaagaacaacccacagtagggcttttgcactttatcttacgttgcttgtgatacttgtcctcagttacttgtgtgccccactcccacacttcactcacgactgtctccctgagcacaccattttaaatagcacccccatgtcatcattctgagcctcagcacttgctacccccactgtagattctatatttatttatggcctggctcctccttagaatgtatgcttcatgacagcagaagctttttctatttttttcactgctacatcccagtgtcttgaagagtatgtggctcttagtaggcactgaaaaaaaaatctgttgaatgatagttatatctaagacaattcatgtttttaatggtattaataaagtgtgaaaatatgaaatgggttaggtttcaaaataatcctttgtgaaatatttgagtgggtcttaggaaatatctttccacagaaattgtgtcacaatttaaaaatacttaacattcttctcttactttacatagagctttccatttcagcttacatttttcaaagagctttctcttacatgatttagttcttacagcagccgtttttttaatagtgaacttcctcagacagccccagtagcctatttgacccttaatactcctgcagtgtggtgcaaataggttaaatgaggtaattcaagtaacatgcgctgggcgtggggtgtgtggaaatttagggtaccagcacacagtgaatagagtaattactcaggggtcagcagagtggcacatcatagtgattggcactgtctaaagtttcctctatttgaaaaaatgaaagagaaatacaactttcttgggatatcttgaagtcagagacctatttgtagtttgagatgaagaaaaatgggcaaacaaaagctggatacacagagagatttctatcagtatgctgataaaacaactttaataattttatctgaaccaccattcataaagttgtgtgagaggagtatttttttctgaaacaccattcacacagttgtgtgagaggagtatttgggggagatacaacactggtcacctctaccactgattgagctactgctgtgtgccaagcactgtgctgggttatttccatcaagagctttatttctcacatcaacctcaagaaactgaaaatgtcatgactctgaattgcaaacttgtatccttcaatgacaaccaacacattttttaaaatataagttgtctacacagaaagagagtgtagaagattgtaattgctgccatttagtagatgactttagtcctctttgttagagtagtgcttcccaagcattacttggcacttgatttatgtgggagatcttgttacacatacggactctatacacccacagtggaggcccaggattctatatttttaacaaacaccccaaaagtgattctcaaggaatagagctgaaactacattttggtaaacattgaactgaacaatctctgttttcttaaagctattgacagtggcaatagtttagaatagagagtctttgtgacttttcatcttcgagggactcattcctggctgccattgatgcaagtatataacaatatggggtttaaaaaaaaagccataggtcaccacaaaccacaaatacttttgctgccaaaaacttaatctataaaacagactttctgatgcataaaagagcttttgagtagagagagtgaatgttgtttatggatatgctacctacagaaggtaagcacaaatggctaagtttatatagaatctgagattttacatcaaatctttctgccagtctcattcacagagcaggtttggaggagataggttctaattcctgttatacttctagtagtctatatctgattcagacgtaactcactgaaacatgagctgtttttatatgatagagcaggctctttaaaaatctcttaatgcctctgagaaatacaacatgataagtttttatgaatgatataatagttttttcacttccatagaatttgtgtattatccatatccccttactagaatgtaagttcattgaagacaaggaatgtgcctctctttttcacagctgtgccatagtctccagaatagtcttggcacacgaacttctactgcgtacactataccagagaaatagttttgtaagatatgtaattaagagtactcttatgtgtaattgaatctttttttatttttaagtaataacacttttcaacaactgttaagacacagttgttggaagccatagtaatttctttgatttttaaagcatgtaaaatgtagaccatatttaggaaataattaagatttataaccaaatacttcatttctgttttgttcttccacctatttagaaattatttattgaggaatttctacattccaaagtactttgattagcgccaattagtaagaagttctaattaagaactcataatgtgaatcttctctaggaatgcattacagttcctgccatttaatatgtccttaagtgaaatagttttctagttattctagttttatttttctgttttaactttttttcttataacctcagtagtgcctgttcaaaagtaaagcaaaccatatataataacgtgatgcctgcaaattcgaacttgcgatgggatccagacttcatgatggattttattgagaatccctcagcccgcagcatcaactactcaatgctgggcaagatcctcagtgacaatgcggccaatcgctacagctttgtctgcaatacactcatgaatgtatgtatgggccatcaggatgctggcaggtgagatgggttaccctggaattcatgattaaccaaagagttgttgccttggtgcttctttgaaattgatgtcgttagtaagtgtctggactcacatttggctatcatttgctttttctaaatcttcttttattccttaatttacctctgcactatcttttaatttccttaacctgagagacagtgctttcttatttattactctggcatgagatgttttcaatatggccaacaattacatgatttattttcaaaaacatataataaaaatataaataagaatgcctgtattttgaaaaaaaccgtatttgggtccacctaaattacatgatgtctataaattttttgatgcccttaaaaatgtaaatcgtagctcagatttattcacgaaactaaaaatattctaattcgtgtatgtactgattattgtttgttgcttaacagcattgtcaaaaatatttgaagccattgttatcttcttctcaaggttctactaagttatttgacaaatgagtattttatctgtgaatctaagaaaatgacttgtttgatgttagtgaaatatatgttaattaagtatatcacaggtgagtatttctcttttgtacaaggttactttctgtgtcttctttttcttttctaggattaacgacatagccaatttctcctctgagcttacggcttgctgcactgttcttagttcagaatggctgggggttctgaaggctctttgttgttcttcaaatcacgtgtgggggtttaatgatgtactttgcactgtagatgtaagttttctttttcatttaaaaattgaactgtgcaattaaatatttagttagtgggtaatctttttgcttttggcttttatttaattgattcaactgaaatgttataaaatattttttctttctctgtccaaaagcagtaaaccacaatgacattgccagggattaaatacatgaaaaaaaatagaaataaatagaatgcatagtttaatctgtagcagaggggccaagaatttctttgtttcctgaaatttccatttagttgagatttcttccatatggatggtctcttcagagctgttttttctttttaccaactgccctggattcctcacagcatgggacataatctaactaaagcagttcacattctgaagaaggccactttgatatttttaagtgcaaggcgcagtatacaaataaaggctttgttgggttacataagaatgtccaggtctagattccgaggatgtccggtgttttttggcaattaatgcctggaagatgatgaaaagataccccttgtatatatcactgacttccttggatatcatgttgcatccatgatgtgtgtatttctttaaaaatctgtcttgattctttacttctcctgttgccacttattggagtagtctttgtcgtacactagtatctcttatgcatagttctttatacatctttacacctgcctctcagttgaaggttgacttctgaattctgctaatcaggactggttggataatcctatctctatatcttcattatatgaagacttaagaatttatgtatataaaattcatagatgtggcctgcttttctggacagaagagacttaaatttttatctttaatatagtttcttaatctcttagttgtttttttaaattacactttaccttctgcaattcctcatctaaaaaattggaattaataatagtgtgaaccttatggtggtgtgctaataaataaggtgatttttgcaagttaaccatagtccttggcatatggtgcgaatcagtatgaagattgctattgtagttgtttttcttattattttctgccaaggtcacgtgagatctagaaaggtaaagatttcactgtgactgaattaatttccccctctgtcctttttcttctttttaaatttaagagtcaattggaaactttcagagttgtttttaaaacgagtttaatcattaaagaatccttagtagttaccactgaaaggaactccaaaaccttagtgaggcttgtttttcaactagggggagcctcctggtttttccctgccttctaattgtctgactcttaaatggtatatcttgttgcagtctgccaaaatgttttaatgatgttacatcttgtagtgatttcctgattttccatttttgttgttttgtttttcatttgcatgtatgcaagtcaaagctcagtattttcttacagcattggaatgtgggtaaacctcattcattgttttataaaatagaaataggcctagaggataatcatcatgatatgttatcatttccctctgctggttcatgttgggatttgagatcttattggtattgcctgcattctcttagttattaatcttagatactgcttacaaggttgttaggtattaaaacctgtcaatgtttttcttgaaggtgagtgacctttcattccatgattcattagctactttcattgctattctgatagcacgacagtgtttttccctggaggacgtcgtgcagcatgtcgcacttccctctcttctagcagcaggtaaggcagcatccatgaacatcagttgctctttgattgttgtcttgatggagtggtttctaacattacaacacagggaaaggagtatttgagggtatgtatattgggaagtggtgtagtatcaaggtagatatggtagaattttaatagttattttatacaaattaacatgtatcaccgtgaaaaaggtgggaaactgctatgttacagtctgttttaaggaagcaccaagatttctcagaaaaatagccagggccttattttcttaccataaggaaaatttatttaaataattattccaggaaatttagcttaataggaaacctgaaggacttgttcccaagtgtgttagaaaacttgcttttccaatccccctttcctagcttgtggggatgcggacgccgagcctggggcgagaatgacatgccgactcttgcttcatctcttccgagctccccaggcctgcttcttacctcaagcaacgggtgagctgactgcagaaaaatctgattaccttttcattggtagctaaagtttctaaaatgaccaaataggctgtccctttctgtaattgccttcttaattttttgggcatgccctgggggtgatgaagggtgagatgatactattcattgagagggctgtcagcaccttttatctgtgtaatatcaggatatattgagaaatacgaatcaagagttagtaagcaataaaaatacctctgctcttaggccaagccatgctggtgggcagcatggtcctctcacgtactgtgtgtgttggttctgaaccacatcacagcagcttagggcaatggtgatttattttattttattttattttattttattttatttcatttcatttcatttcatttcatttcatgtcatttcattttatttcatttcatttcatttcatttcatttcatttcatttcatttcatttcatttcatttcatttcatgtcatttcatttttttttttttttttccaagacaaagtcttactgtgtcacccaggctggagtacagtggtgtgatctcggctcactgcaacctctgcctcccgggcttaggcaattctcttgcctcagcctctcaagtagctgggactataggcatgcaccaccatgcctggcaaatttttgtatttttagtagagatggggatttcactgtgttggccagactggtcttgaactcctgacctcgtgatccacctgcctcggcctcccaaagtgctgggattacaggcgtgagccaccgcacccatccctcatttattcttgtactaagtaaaaggaataaagtaagaattttaggggcgttggtgaagtctgctcctaaagatcatttccatatagataggcatgtgtctgtgtgagaatcaacacaaatatgtgaaggtcctactaatcttgttgatgtagctctctgaggaggaacgacattgttttaataaataaaaagaaaaggataagtgaggaatactggccatgtttcttagtgaatccatgaagcatcaattaaagcaagctaatggcaattaagcacccacagtctaacaatgaaaggctgactgcctgtaaataattacaaaacattactaatgatggtaatgagactattaaagatttgttgtttttgtaggcaaacctttccctggaataagatcatcttgtgatagacacctcttagccgctgctcacaacagcattgaagtgggagccgtgtttgctgtcttaaaagcaattatgatgcttggtaagattattctgaccctaagcttcttggttaatcaccagaaatgaaggcaaaataatttattttcaggtttaaatctagtagtattattggaaacatgatactgtttgatcgcttattctcctggaaaaattagtggtttctcctagaccaaatacatcagactctggaagatcctgtcccttatctagtgtctctgggggaacttacatgtaatattttttatggtattttagttgcataatgtctcattctgatgtaaaataggtcctcagacccacagggttgttttgccttctctggtggcagaaatcacactttgtgagagacagggatgacttggtaatctaactaaatgtttacattttatccagattatatttcaggagcagaacaccagaaaatctgagtcttaatcttagtatttttgctcctatcatgaccctgaacgagtatatttccttctacctttgttttttgatgacccaggcaatagttgcaatgatgttgatattattgataaatcaatattaagtttcacaataatttttttcatttaattcataatgtccaagatgttctttacatccttatttgtaagaattttcctggaataatagcactgccttttctcttcatttacagggtaatacattaaaacattattctgtaaatcttaaaggctttgaatgattaggaagtcttcaagtcagactgcctaattccaactttgggtaccttcttttggtcttgactcttatgttcagaagtagctccccttcattagaacagaaattactgagtggataggaattgctttagatgagtcctaaataacatgttttgggctataatcttgctctgctttggaaatgttatttggtgatgatgaggaaggataacagaattttcataaaacaagctattaaaacttcaccttaagaaaggatacacacacgggcctgtgaattttgtagtaaaaaggggaggtagagccacgtcaaggaccacagcctcctctgagtgtaggcgcttatagatttatacagccaacattaagtgctcatttcagtgagtagaatttccctactgtgatcatatttgaagggaaggtcagttggtcggttctacttaataaataaatgtagggaccatagagatagggactggcttttttacctgtggtatttctagtgctcatcagagaagctagcaaagaatcagttttcaataaaattatgttggaagtgtgaatctataaatgacaaatatgctaatggcagaaaccaagatgagtaccttctagacactggccccatgatttgtaggattagtctaatctcaagtagaatttgcccacctcttcatccacataatttggaggattccctgggtctaagaagtcaggatcaggtcagtttaacgtcagcagagctttgagccaggtgggcactgaacgctcaaatgtattctattgtcaatgcaattgcagaaggcctggcacagactctcataccttctctgttgtcctaacatctaaactaaatgaggatctcctagtatggggctagcaggtactgttttttctctttcttttcttttcctttcttctcttttcttatttgcagaagctctaatttatccaccctaccatgccctaaccaactctcaattcctatccaccaggatatattttgagttagggagatgggaccattatatcaaatttggtttttaatttctacaatgtaactcaaggtatagaggtagttgtttacatcacctaacggtagtgaaagcatactacattttggtacttgcagaatttagtcttttctttcagctcctgaagtgatctattaaatgaaatcctgtgggtaaagtgaagctggtactctttgtgtttgtattttaatgagaaacatatgattatatattgataaattgaaatacattatttattcctctcctctgcttaagattttgttagtaaatactcagtaagccatttttttcagcaaagtcaaaactttttcttggttgacttgtgggttttaaaaggctttttccattaacttgggcattgttttgcccacttgctgcaagcagtgaaggcctactgtaaaagcatttgttggttccaggaaattttcttgtcaaggcctatgatcctgtgagtaaaaggcaaaagtttgaaggctgtgctgtcatttggcaatccttattttgaatttttattactctctcacttttaaaatatgatagttatttgtctctcatggctagagttttcttatttctagctattcagacattctgtttagtttctttcccagaactttgttatgaagaaaacactttccttagcttcatttcactaagtatactaaagatttatcaggtaaggttttctaatttgtatgttacagagaggaaggtaaaaaaacaggggttattcaatgaatgccctacttttcagggcttccttagtatgcattgcccttttccattcccagggaaataaatctctcttgtcaagaagttgatagtaaggtgggctaaggcaaaacttttctcttgacctatggatagaaaataagtcattgtaagagaagaaatggaaaagggacatctagaagggtgagtaacccattttttccttgtctataagtcaaatgaatttgaatacattcatgcttgaaatattggtgaaaccaatgttctctgattacttagtgtgattcataatggcctttccaagtttggtgaaactataattatacaaacaaaataaggaccgagtcttgaacttgctttttctccatttctgttagaaacttctctgggttcatgcatttatgctcttgatccattctctctattcctgaacaactggctattcaataataatactgttcatatattttaaatccctgaatgctatcctcatttgctcctcaattatttggcaatattttgaacttctgtgattttgcttttgtgattctattacttaggagatgccaaaattggcaataacagtgtcagctctttaaagaatgatgacttcaccatgagaggtttgcgatgtgatgggaatgctgatgatatctggactgcctcacaaaatccaaaatcctgtgggaaaagcatttccatagaaactgccaatttaagagaatacgctagatatgtactgaggactatctgtcaacaggtattctaatttaatttgccttttactttgagtacgtaactcttcttttggagagagctacttacacttataggaaacttgtgcataggtgggcctttttttcttgctcactttatttcgaaataattttaagtttgctgaaaagttgcaagaattatttttaaaaaactcatgtccatcctttacacggatttactaatttttacattttgctacatgtgctttgtaatttgtatgtggagatgtgggtgcatatacctattttttctgaatcatttaagagtagattgtatattttattcttttgaatattgcattatttcataacataaccaaaatatagctattaaacatcagaaaatttagcttttggtacagtaattttttctcatctataggccacagttcgattttattaattgtcccagtattgttggatttgtctgaggtttcctgtagattagcttcagattatgcatccctggccaagatactacagaaataatcttgagttctttcaggtaatcatgtctgaaggcatgtgatgtccatttgcacctcaagggtgatgttaattttgattaagatgtttccattgtatagtttcaagattagtaactatacagtggggactgtgtagttactaattttccccttgcagtaagcaatctttgaggagatacttcgagacagtgcaaattttcttctccttgtttaactcccccacccctcataagcattcattttcattcttgcccagtctagtctttactatgatggttgcaaaatggtggtttttttttttccccaacttctcctctcccttcataatatcagtttgtgtcctattttaaggaagagcctgccctcctctcccctgtttatttattatccatatgggttataatatactgtacttagttattttcatgttcagactgtcccagatttgtgcagtaggaatctattcatcctatcacatcatttgacattttaaaaatagttggtattttcatagtttctggcccatgttgtactttctctgccccgggcctggaatcaactattcctccaaggagcccttggttctatttagcagagaacgttactgagaaaccaagatctgggtattatgtatgctcatggttatggagtatcattaattctacgacctgtctgcagacaaagctagaaagaaaaatatatccatacacttaaatatatgtaaatatatatatttatgaggtcctactgataccttcaattccaatccaaccccacaaagttgttctgtgttttcccctaattcatattagtatcaccttcttccctagtaagaatgctgattcccaaaaacgtcaatttacttgtttgtttaattctatgatacatctgaaatagttttaaaatgttacacatggccgggcatgttaaatgtgctatccagcgctttgtcaaaaaatgattaattaaaatacagtatcaaaaatgtacactaggctagggcgcagcggctcaagcctgtaatcccagcactttgggaggctgaggcaggtggatcacttgaggccaggagtttgagaccagcctggccaacatggtgaaaccccatctctactaaaaatacaaaaattagccaggtgtggtggcacatgcctgtcatcccagctacttgggaggctgaggcatgagaatcgcttgaaactgggaggcggaggttgcagtgagccgagattgcgccactgcactccagccctggtaagagagcaagactctgtctcaaagaaagaaagaaagaaagaaagaaatgttacacacataccactaggaagaacaaacctacctaaaaggctttgaagatttgtttgcaattccattttctctaagggtttaaaatactgtgttcaaaaattatttgaacttttcccatccctatgagtgtattctttatgtgaaatagaactaggttcatttggttttgcattatttaaattcctttcttgtccccagctctggctatagaatagcttactttcaaaagtgaaactatacaaaaaagtatactcagagatgtgtctccctcccatatccctcttaccagatgatccagttttattattttttggtttattctccctcccatatatttgttttaaaagttctcttataaaaaaaaagtgacataccttatatattattttgtactttgctataggtgtcataccgactgggtcatgtttttgtatttttacaggcatgttataactatggtaaaagatagctacatagtcatataagtattgagaggcaattgtgtgttggttcccaactgtgagtgcatattggaatcagctggggcatttaaaacaatttggatgcctaaaaaattactgatatttgggtgccaccacctgagtttgacttaattagtctgatgtgggccctgggcatggaattttataaagatcccaggtaattttagtgggcaaccagcattgagccactggtatggtggttaaaaaacagacttcacccgaaatagatctgggttcaaattgggctctgttactgttgatgatttcttactttatttagtataataatttgcctttgaaaaaaatggtaaagaaaaggcaataggagtttaaattggtagaaactcttcagagggtcattaaccccatgcatctatagccccccactcacactggacccagcaattgcacttctatgaaattaccctaagaaaattattgtataaaaaagagatgtgcactactactcatttataatgataacattattcataatagtatcaaaaaggaagatcgttttctaaatatttgttatactatgttgtatctagtcagtgagatagtacaatgtattccataaaaattatgaagaacgtatatctgatagaatcattatatagcaagttagaaaaaactgacacaaaatagtgcctagagcaagaccttactttccagttaaaaacatactaatattctctttattgtcttttcttttttcccattaaaaaatgtttttaagcaagttctactttgtattttttagaagccaaaatgctaaaaattttgttttttaaaatttttctacctactttttaatgtaattttttaaattggaaaattcctatcagttttctattcaattatgcactgtggatttagtacatattgcatatatatataccgaaagccagtgcctgtcaatctaattgccatattatttttaggaatgggtaggagagcattgcttaaaagaacctgaaagattatgtacagacaaagaacttatattggaccctgtgctttcaaatatgcaagcacagaaattactgcagcttatctgttatcctcatggcattaaagaatgtaccgagggggacaatctgcaaagacagcacattaagcgtattcttcaggtcagtcgtatacagattgtgtttctgtcatttgataaattcttcgtaataataaaaagagttacttcctctctttttttgtccttgctaatttgtgatttcaattctgatttttattcccacacattttctgtggaattgacatactttatttttgggtggatgtacatgctgcaaattgtatatgatcatcaaacaaatattgatattttaaatcagtattgtatttacatgagaaatatgcttcagagaggggctatgttaaatatattattaaagaaatattgaaatcattttggattgggattggttaaatagattttgaaaggagaaatgcttatttagtttcagtgcatagctgagtcaggcacagtattaactaattaataattaatgtttctgtttattggtttgtatcgctactgaatatatatgcagcaagattgggaaccttttgactcatataaattatttcattgtgtatgattattctgctctttcttgagagaaggagtactgtaagaaattactgtattttaacacatttgatacccataatgttttaattctttccatttttcccagaatcttgagcagtggacactgaggcaatcctggttagaactccagctaatgatcaaacagtgcttgaaggaccctgtgagtttatattgaaagcttatctctgtatgaaattttataaaaagcaaaaacacgttgatgtttgaggataaaggaatacacatatgtgccagtattcttatatctaactctagggctctggttctgtggccgaaatgaacaacttactggacaatattgcaaaggcaacaatagaggtattccagcagtctgcagacctaaataattcttctaattctggcatgagcctcttcaacccaaacagtattggaagtgctgatacaagtagcacgagacagaatggaataaagacattcctaaggtatttttgtctgttgttttattgaactgtcatgaatttttcacaagtaacggtaaattttgtgtagcacagtgatttttctttaagtcataggaatgtgaagaacatagttacttgtaagcagggattattattaataagttaatgagtaaagctggggtgaatgatagcttcggaatatttgattgagtaggcttaaacaccttgaaactgcaggtgaactcaggtttggttcatgctttcagtgtcccttagtctactgtgttacgtagtattcattatatgggaaacgctttttccaccatttttattaattaattattttgcacaaatatatcctggtaatttttgtgcagaattagaaccagtaggcatataaagtcttaaagtaattatttaatcatgaaaggctgatttgtatttcatcattttggtataaagtataactagcgaattttaaaccttaaaaattagctattagtatgcttacatataatatttcatattgtaactgtgacagaaaagtatattgtttgttggacaaagtgattgtttttaattagagagagggggtcatcggaaaacattaaagtcagtttagttacaatatccttccagaactgcatgttttattgctttctgtaggcttaggtggaaagctcatgcaaatgtctagtgttcggaaaaaggaaagataatacagaaataaaagggaaattttagaacagtctgtgtgtctcatacatcaaagtttcgctttggagtttctgttataactgtgagagcaggggaaaggatgctttctccggtgtaacacctgtttctgattttagttcctccgaacgcaggggtgtatggttggtggcccccctcatcgccaggttgccaacttctgtgcaaggaagagtgctgaaagccgctggggaagagctggagaagggacagcacttgggttcttcttccaaaaaggaaagggacagacagaaacagaaaaggtgtggctggaagatgggcgtctgtgtgagagtttaaagaataattgagaaagtctcacttcctgtaaacctgtgtggtcactgtacccacagtccactgaaatttagtttttaaatggaactgggaatattctattaggcaaggctgtcttattcctaaaaaatttcaggttataatccttaatacattagttctcaattctgcctttatatccaaatcactgctgaactgttaaaaacagtgatttccgagacccgctttagaccaactgaatcagatctggatagctacctgatccctgtattttatttttaattatttctatttttttattatttagatatttatgtttaaaataaatataatgtataattctggcatgttggtgtctgaactagttgctcatatttttaacatttagggctcctgttctagactagacattaagactcctcggccaccacaactaatgttttcttaatttattttatgcccaagaaaaggtttcaagtaattatatttgaaaaccgtgttactgagaaagaaagaaacctcaccctaatgtgaaaatgccaagaaacctaggagtaaaggaaaaaaattgataatttcttccattaaaaaaatattttaagcacatagatttcttgtccactaatgaataatactatagtagccaccatttattgactgcttacagaatggcaactcctctctaaaactcattatgtacatgagcttttaaaattcttatagcaatcatgtggtaggtactctcattatcttctttatatcatgttgaaacagacacttaaaggttacatgagttgctccaggacacacagtgaaggacataaagcctgggtttaaatccaggaggtctggcttctgagcttgtgctcttaactacagtacattttggtagagacccagcattgtatgtactgtatttgttttacatctggttgttttaccatgttggccaggattaattaaccaacaaggaagcataattctaattttcaaatcatatttgctgataggtgagtgtatgtgcattgcctaacttcccataggcaggacagatggtattgaagagacttgaaagatcgctcttcccacatcaggggctctttattctgcccatggagaataatgctgattgaaatattttggcctaggtctcattttaagaaatttgtctttccaacatggcgctttgtttgtcaatatgatttgttgattattctctaattgaagacattttgttaaaatgccaatttaaaacagaatttttaaccaaatgccttgacacctctttaccagtggatgctgcgggctatgttggagcctgtgggctgtgttggagctgcacactaggggtcgccagcaagtacactgtttttggagtcctcagccctggctgatgaattagctctactaacaccctgctttttggtcttgggaaatgtgctgaaaaacaaaatcaaaccccaaaacaagctcaacagacatatatataggcctgttttcccagactctaaaacaagagttttatatgagaactttaaaaatttttaattttatcctgtgtataaattgatattctttctgatgtacatttttaaattctgcatattgatgtagaagatgaattcactgtcttctaccctcactgcccggcatgctcacatgcagtatggattgatgctagtttgagaatggcttcgagggcaattagagcatacgaagtgatttagaagcattacagtggcttttaattttataagtagaggtatgatttaaattttcaagcagtctttggctatttaccacctctcttatttatctaatagtgaggcaaagaaatgaatgttgccagaggaagtaatgcattatttctaactagatctgttgttattattacttcctttgtagtatgtctcttttgagtcaacaacccttcctctcactggtacttacctgccttaagggacaagatgaacaaagggaaggcctcctaacatctctccagaatcaagttaaccaggtaaagtatagtataatattaagacaggcaaatatctttctaacggcattcatttatttgcctttcaaatactgagattaaattaataagggccaggtgtggtggctcatgcctgtaatcccagcactttgggaggcggaggctggtggatcacctgaggccaggagttcgagaccagcctggccaacatggtgaaaccccgtctgtactaaaaatacaaaaattagccgggcatgatggtgtgcgcctatgatcccagctactcgggaggccaaggcaggagaattgcttgaacctgggaggcagaggctgcagtgagctgagatcgcgccattgcacaccagcctgggaaacaatagtgaaactctgtctcaaaaaaaaaaaaaaaaaacaactagtaaggttacaaaatgttttgagtagacgctgagaaacaatccatgccttattcttctacctggcattgtagacaccacaagattaacaactttatattaatgagatatatacaataaatgtgtactgcctataaaagtaaaattttatatattgcatataactttgaactatctgcccgtctcctaactctgcctcataggagaggacctggagcaatctatgctgcagtaggcatggcagtgagtccagctcctcaagcttggatgccacattatcaggcacgctttcagcttgaaatctgtaggttcagaaactcagttgtattgatgccaaccaagtacacaagaaataaatcagaaggcatgttggtttatttagaaataatttggacattgccttttcaccaaacacagttctcctggtcactgtttgaggctcttgcatctatgtactataaggaaactgagcattcacaacagaaattggagagcatggaattaagcaaagtggatagattggtcttatgaggtgttttatcctgatacacagcctaattgaccccttcttgtggcactgtgtttctatgacaccatgtctttccctcgaatggtactagatggacatggacaaggacacttaatcttatttgatcctcttgtcatttctcaccttttgggtaggagagatctagatatagcaatcatagtgaacctttttaaatggaagtcacatattacctcagtatacctagtataaaaaattcgggctgataaggccagacatgatttgacactggctctctctcctaccttgtctcctaccagtcatggccctctttcctccatggttgttgcactggccatgttactgttcttgaacttgctgagcaaattctcatttcagtgcctgtgcatcttttcttccctttaggtggaaagattcccttccagagattagcatggcctgctcccttcattcagttctctgttaagatgttacctccttcgggaggcctttgatcacctctaaaaataggaccacagccattctgtatgccattgccatgcctcaaaccacttgttacacttagttttatttgtcccactactattatttgagctccatgagagcttgttgtttagttaactaccttgcccccttaagccagccttagggaggggttcatttcttctgatgagatttgggaagtgctttcctctcaccttgcagggtacttacaggtcatctgttgggatggagtacttctgcatgtgactcatttgaactcttttaagatgactctcattaatgaccatatttcagagcatgatagggtttttgttagtggttttttgtttttgttttgaattgcactttttttttgctcatctcatctgattttagggtgttgcccacttgtggctccctttcctaagcaaatttttccttttccagcattagtgtgagtcagtgaggaagtgaagaagcagcccactttataaactgataaagccacttggctgatgtctgcaatgccatatttttcaaagtaccgtgcgttctctttatcaaggaagacacatacataagatagcagaccttctcttctataaaacatcaaaataatacatttgctagggttcagcaagtccctagaaatataacaggactgaggcaaaatgtaattctctctctccagtgtttttcttcgtaagatcaatgaggtaatgtattttaaaagtttttattaatgcttaatttgatggccctctcaagcattttcccagacttaatcataggctagctatataattatataagattttcttcctccacctagaacggcaaatgcacaaataaatagccagatttctttctgcatggaggaagaagaaagctaaaattttatttagctttgtttgttaatttgttaaagataagaagtggttttttgctatcagtataaagctcaatttatctttaaatgagagaaaaattaaactttaatggggagtttttttccggatcttagattttaagtaactggagagaagaacgataccaagatgacataaaagcgcggcagatgatgcacgaagcattgcaactccgcctaaatttggtaagtgacatttctagtattttccctccattaaacatatttacatgtgaaaatacctccagctttccacttctcctaagtgcaaagtctgcattacaaggtgaggccttccactctttgctctctgtaattacttccctgtttctaaagccttctgtttcccttgctgctttccttcctgtctggtcagacatctagacagtgctaggtattttaagcatagatttgccttctctacctctaccccagtgaatctctccttctcttcagtttgtgctaagaataaatctgagaagactgttataagtgttagcttctactatacttacttaaaaccatttaaaaagtcttttaactcaaagttttgtccaactttccatcaaattgattataaagacaaatcccacagagaagttttatagaaatttaaaatgtctcacatattgtgcattccttgagttttcttttcccatcaggcaggcccaagtgcaggcccctctggaggatggcctgcctgatacttttgcagttgtttctaaccttgtcccaacacgtgaactggtaggtgtgcgggccaagcctcctgcccaccactgctgtgatagtggatgtttccatatggtattatgatagcaggcttagattcaatagtaattgtacagcaaacacaaagatgcagataattggattacatgactttgacattattcaggtttaattcaactataattgcatcataaaactggacatcataaaagatttggaacaaaagaaagctaagtttattggtgcccacattcagatactcacgtcccttcttcattttagttaatgtttgaatgactgaactgtgctgaaagaactaaaaatagtgataaacatgtaggtaaaagagaaaagataaggtaatctataaactagagcatcccttgtttttttaaataaaaaacaatcaaaatttgataacataaagcaatggggtgttctttctgttttacagaatgcaaatatcttactgtattttgtctgctaggtaggaggaatgtttgacacggtgcagaggagcacccagtggactacagactgggccctgctactccttcagatcattacttcaggaactgttgacatgcacactaacaagtatgtttttatcacttcacattgattttgctacatgtatgcatggtataagctttgatatactgatggcgatttctgccacatcttatttacttggatgctattaaaaattctgtgccttgaataaaaatactcagttaaataagtgtatttcagtttcactttaagatgaaaataattattttctttcttagtgaattattcacaacagttcttgacatgctgggtgttttaatcaatggaacgttagcctctgacctatcaaatgcatcccctgggggatctgaagagaacaagcgtgcatacatgaatttagtaaagaaactgaaagtaagtttgagatcagcctgtattatgagctcaagttgtttatggatttattatctagtgcattttaatttattactcattaaatgttattaattgtattcaacttaatttaatgtgattatttgctatttgtttcacctaaccttattagtacccagaagttacatgcacataaccttgattattttttattgaaaacaattacattataaaacatgtttaattttttaaagaactttagaaatccactgttaaatatataaccagaatactaacattagatagatttaggataactctatgcttggactggcacgtgtaattgaaaaaatagccatctgcattgaaatttataaatcgattcatttgaccgaccactaacagactcctttaaaaaaaaattgtaagaaaacagtgcaaaaaagaaaccaaataaatctgatgcattaccaatcaaataaatcaatggttaccttgtaatctgaccctggacatgagaaagtgttctgttctgcagctcctgtcttctgattgtgatcactaccctggatttttgtcatttcagcactatgatgtttgttgtgtaacaacagtgcctttgtatgtgttctattttctacttaaatagaagaaatgaaacactcattgctctatttggaactgccttgtagaacatgttcagggttaaagaacatgcgctaagctataaaaagggaaatgtttcataggggaacttccttctggttaacttttgccttcattgtaatttctgtcccacttctcactctctctctctctcttttttctttagaaagagctaggagacaagcgatcagaaagtattgacaaagttcgacagttactacctttgccgaaacagacatgtgatgtcatcacttgtgaacctatgggttccttgattgacacaaaaggaaacaaaattgctggatttgactctatagataaaaaacaggcaagagtgaatgttttttcttatatataaatttatttacaaaagatgaaatacttttttttgtcttaccataggatatataaaatatatgaattttgctgttgatgtttttaaggcatatgcttgtcttctaagtgtacttagtcattggcattatcatataaagaggtcatatctttgaagatctacgttttatatgtttaaaggacttaaaatgtttccctgaatttaagtaaatttttggaaacctaccaagagaaaactaagtaaaagcttagtgtaaaaaaaaaattgcataaataagttctgattatacttcagatttagaagcagaatatatttatcaatgaaaaatttcttgtaagctgagcatggtggcacatgtctttagttccagctacttgggaggctgaggcaggaggattgcttgaagccaggagtttaaggctgcaatgtgctaggctcatgcctgtgaatagccactacaccctagcctgggcaacaaagtgagaccctgtctctggggggggaaaaaaaaaaaaaaaccttcctgtagtaagctatttcaaataaaaattattttaattgttaggatattctctattcctatcaagcagtatttaatggacatttgttttatataagatattaaagatggttctctaaaatatgagaaaattggtcagttactcttttaatgaacagtaagcaaccaccgacattccacaatcaccaagatgaaagacagagttcctaccctcaagggggaagtagacagacaattacagtgtaatgagatttgtgtgacatggtacagagagagtattaggggatagaatagagggtccccaggaaaattgacacgagtcattttgaaggattaagagttagctgggaggtagggaaaattgtggtacaaataaagggagagtttatatgaagacatgaaagaatcagatttaccagggaatttagagtagcctgagaatctaataccagtttgtgtaaagaaaaaaagctaaagtcatggtcaagtttgagtttgcagtgtcagcggacttcctggtagtaagacatctggaatccatttggatgtgtggtttttacaccaaggaaaaagttctcatctcaagacaaatattaggaaacagtcaatttacaggtggcaattgaaccttggttttattttgttttactttgtttatttatattttttgagatggaatctcgctctgtcgcccaggctggagtgcagtagtgcgatctttgctcactgcaacctctgtctctcgggttcaaacgattctcctgtctcagcctcctgagtacctgggattacagacatgcaccaccaggcccagctaatttttttttgtttttgtctttgtttttttttttttttcaagacagagtcttgctctgtcacccaggctggagtgcagtggcgtgatctcggctcactgcaacctccacctcccgggttcaagcaattctctgcctcagcctcctgagtagctgagattacaggtgcctgccatcatgcctggctaatttttgtatttttagtggagacggagtttcaccatcttggccaggctggtcttgaactcctgacctcatgatccacctgcctcagcctcccaaattgctgagattacaggtgtgagccaccacacctagcctttttttgtattcttagtagagacggggtttcaccatgttggccaggctggtctcaaagtccttacctcaggtgatcccacccgcctcagcctcaccaagtgttgggattacagacacgagccactgtgcctggcctgaaccttagttttagatgaagctactcataaaagaatgcgtatagataacaacagtaacacttacatcttagggaatgactgagtagttatttgggggccatttaaggaaaaatatttttaaattgacattttaaggcaagtgccaagagatgtcaccaattaatgttaagaataaaaagagggtaaccgtttttttttttctagagtcagtaaatataagcttgagttgaaagactttacttattcctgctgctacaatttaattctctaataataatattatattcagagtatggcttattaagtacagggcccacatattgaaccaagttcatgcagatttggattgaagttaatactaacccaattacaggttgactataacttgactcttaaatttgatattatcttcaaaattataaatagattacagagatttagaactggttataatttagtaagattaactttgcagtgttagaatttttagcaacaaatttttagaatttttttagcaaaaagaggaaatacacattaacaataaaatatgctagactgcctctgttgcctaaacagagcatcatgtggttaaagaactgtagaaccgggcttacaaaggtctgaattctagccactgctctccggtgatgtagctgtgtaaccctctctgctgtattctcgggttctctagggctcatgccagccaaagtgttctctgactccatgtcccatacaagcctggcctatgaataaggaaaagatctgagtgtgctatcttagagcgctattttcccacagggtctccaggtctctacgaagcagaaggtgtccccgtgggacttgtttgagggtcagaagaacccagctcctttgtcctgggcctggtttgggacagtccgagtggaccgaagagtgatcaagtacgaggagcagcatcacctcctgctgtatcacacacaccccatgcccaagccccgcagttactacctccagccactgcccctgcctcctgaggaggaagaggaagagcccacatctccagtttctcaggaaccagaaaggaagtccgctgagctgtcagatcagggaaaaaccacaacagatgaagaaaagaaaacaaaaggaaggaagcgcaagacgaaatctagctcaagagttgatgtaagtggggaaaggaaggagaaccttggctcattagcatttagtatgagatttactcgtgcccaaatcatatccctcgaaacattaccaagagcaggataagttttgttatgacagttctcctaacaggtttctgcattaactgaatggcacacaatgacttgtcacagacaaaagattaaagcttttgattttccgtcctccacttttaataattttattttaattgtaggcttccattgtaatatttaattaatatttcagtgcctcctaatttcctcgggtttgaaacttgaaatttttagaactatacaatcccattctctcacatatttttaatatgtctaaaatatttattgtattttaagtggttgatatcttcagtaaattaacataaaaagctctatttggtttttctttgataaaacttggagttagcatagccaataggatgttcctgagattttatgttttactattccatcttaccctcatatattttccttctttaccatgttttcagactttataaaagatgaaaataagcctaatttaaaatagttttacttcttgtttctctattagtgttccccacgtataataatcttttcattacaacagaaatctatttgatggtgatttagaaataattttataaaccttgagaagtaatgcataaaatgtttttctatttaaattaaattaaaacctggaaaatatttgatagaggatttgagacatttttaatgaaattccacagcattcttgctgcacagtggaagaaatattcaccatttcattcagatattcatgattggttattgtttacctatgtgagaactaaaatacatcttttcctagctgatagcttggtgattaatactattttagaaatgaccaccaccactttaggatgccacttgagcatcagtgcccccttctcattcagtcttcctaccagtattcctttgtcttgaagggaagtttaaaatggtccagactgacactccctcaaatttggggtttccagcctgtcagtccacgtggatgggcttttgttcttttctgatgaaaaagccctgaaaccaatcctgctccccaggtcagtctggtcatgtcccctcttcctctattcttcctgaagctccctcttttcaatgagatatgctcttcagtaaaattgcagggaaatgagattttgtttctcttccatcctctagggctagactagatgagggaaggtagggaaattgagaccttcaggtgtgatccttacaggctttgcagctactataaggaagaggaagcatgggggatgaggggagtgtctacttctttagaacgatgtctggaaaattgcaagtgaaataccatcttggccaaagagtggttctgaagcactgtagggctctctggcgtaattctccagacccaagatattggaaaggccttctaagatgaaatgatcatgagtcttagcaactgaaggtgctttttcagtgatgagtgtcgttcagtattggtattcctgacacacttgtagtcttttgaaatagaattcagaagagatccttttccatctctgcccactgcaagccaagcactgtttaagtcaaggaaaagtttacctcaaatgaatatttccaggggatttattagcactcttccttccatcttctcctttataaaaaacagctttgtacattgggataggaggtacctcagatagcttactgaagttatttgcattaattagctgtgtgatatgtggagttacgtaactttttaaaaaactttatgttgaaggaatatccacagagcaacatataccgagtgcctcctaattactcgcctatctcctcccaaatgatgcaccatccacagtccaccttgtggggttacaacctcgtgggccagccccagcagcccggctttttccttcagaaccaatctcttactccaggtatgtgatgagaaagcacagatcactcagagatgagaaacagcttgtggttctctttgcttttaacctgaaacctccacaaaacttggacatttcaaccactgagtgctcagttgacatttctgtaattcccttcacacagaaatgttttttgttttctaaaataggttaaattacgagtttatgtactgattttggaacttttatttagtgttaaaaggaaattagctagtgatgaaaatctaagctgtaagatataaaagttgataacggttttatgttataaaatgtgtgtatttttatcagatataattcttattggcattttaaaagattacacaatattgcacagtgtcttttattgttctgaattatcatgacagctaagaaaattggttcagcaagatttagataacaacaaggaaaactaccatagtaaatgttcctgattttagtattgctttggttcaagcccaagtagatttctcgtcccaaatgaaaattttctaaatgaaaacatctcttaatgaaaaatgaattcaattttctttctatatgaaacattgcatgttttagcatatttaaattatttgaaatctgtcagcattgttaggatgtgccattttaacaaataattttttaaatttttctattgtgatttttattataacttgagtttgacattttgaggtctgtggaagaaaatgtttcatttatggcttatagcagggggaaatccatattttgtcctctaaattaatggttaaaggaactggtctggtagttaagcgttttagattcaaatctggttctaccactctcttgctgtataatcttggccaaatcttaatttctctgtgcctcattttggtcatctgtaaaatgaatatgctaatacctattcccatagggtgggtgattcagttatttattcaagaatgtattgagcttcatgatacagtggacccagttttggatgctaggatattgcagtgactaaagtgtgcaaaatacctactttttaaaagatgaaataaagtttatgttacacacacatacatatgtaagatttaaaagtaaattgtaatagttatatagccttttgaaggtagcctgaccccacagacatgttcagtaagtgatcttcacatattcctagctcagggcatttgtgcttgctgacccctgtgcctgcagtgctctccctcaaatatctacatcacttcctgcctgtctccgttgggcttggtcacattactttctcactggggcctttactaacctgttttaaattgtagacccataccccttccctgtaccctctgtttctctcttttttctgtttctctgttgcaagcacatccaatcttttggcttccttgggccacattggaagaagaattgtcttgggccacacataaaatacacaaacaataggcgatcaactacaaaaaaaaagaatcacaaaaaaaactcgtaatgttttaagaacgtttacaaatttttgttgggctgcatacaaagccatcttgggccgcatgcagcacacaagccatgagttggacaagcttgctctacagcatcagacttgcttatatcttactttcttattgatttattatcttcccagaatgtaagcctcgtggcagatatttttcctattatgttcactgcagtatccccagaacttagaggaacctctggctttatagtaggcttttaaaaatagattgttgagtgaatgaatatagactacaaactagactcagagtgaaaaagaaggatgcaatcatcatccttttaaacttcctctttttaatgccacggtccatgtgaatttttagccattttaaactttggagatgtagaagtttgtttgtagatgtagaagtttgtttgtagatatttgacacacaaggactgtctgtgaattgaaagctaactactttgtaaaagcacataatctctccctatagaatactatagaaagctttttataaactgaggaactttaggtgtgagatggcatttaaaaaataaattttgggctgggcacggtggctgacacctgtaatcccagcactttgggaggccaaagtgggcagatcacctaaggtcaggagttaaagaccagcctggccaatatggtgaaaccccgtatctactaaaaatacaaaaaacaaaattagccaggcatggtggtgcctgaaatcccagctgcttgggaggccaaagcaggagaataacttgaacctaggaggcaaaggttgcttgaactgagattgcatcattgcactccaccctgggtgacagagcgagactccatctcaagaaaaaaaaaaaaaaaaaaaaaagtaaaaataaataaataaataaattttgaaaaaaattatttttgaggatttatatgagcaaatttattttcatttaaacaagcacaatctaaagttacaagacagtatgtacagcatgattccattcatatagggtttaaatgcaaaacaatctcccaccatcactcacatacaaaaacatatgtatctttcctaatctttctcatatatacacaccagtattataaagttgtaaggaaatgcataggatagtaaactccagattcagagtagcatttggtaggagtaagtgaggaaagtaattaggtgtacaaagggcttcagccatatttgtaatattttattccagtagtttctcagaggtacaagatcatagagttaggaaaatttttaaaaattagattatagtttaatctttaaaaagaatttcccttttctgtaaatgagtctctttttacatatcaatatacataattcttaacacgtaatatatgttctgattgttgcttcaatagaagttacccagccatgtgttacttagattgatcttctgtttttttccaaatgctcttcaaatgctgctgaatgactttgtaaatagaagaagatggctgaggcaaatctcactcattttagaggtttcttgtgccaaggttgaggacatgcctgggagaaaggaacacagaatcacaggaacatctctgctttttccaaagaggatttgggggcttccgtatttaaaggggaaagagtaggcagtaggggaaagaagaaagaaaaagaaggggaagtagataaaaggagtaagcagtttcattctttagaggctttgatcagcattccctgaatctacattttacatatgaaagaagcaggttaaaggtttagtcaattacggtgttgaatctgcatttttacataagattaagtaaacatagagtagaggaagaagtcaagtatatatttgtctctgataagtggagggatgacttctagttctgtcctgctcccccacaaccccccctcccaccgtaaagataagctgttaattttagggtaaatcttttggaacccacaaggaatttccttgtgagcaaattatgagggagacctcctagggaggtatatagccttctatctttgtagctatctatttaggaaacaaaccaggggatagttttgcatgactcagttcccaacattgacttttacctttgtcatagtgagtttggtgtcccaagatttttagtttcctttcacaacttcataaattgtattgctgattgtggcactgagtctttaaaagaatgtgggtttttccaaaaaaacagctttaaaatgtttgttttcatcatacaccttgctttatagaaaagataaaacaacttttgtgaggtgcttatgtagaggtttttttcatttacatgtatcaaggactatttttggtgaatgaagaatttacatttattgtgaagccagcaaatgtcgacttttttttccctaacttttaaatgcgcgtgacaaattataatatacaaatatgtaaaggatttcctgtggtttcttaagcatcggtataatagttgcttgtttatttgatttttagccttcaaaaaagatgttttgtcattacaatcatagtacttgaagtttgcaagcatttcaagattttaaagtattttcatgcctctgctataaaacaggcattttcattttgccatggtgaaaagactttaatgacatgagcttcagatttgatgaaaagtacaaaaggatttatatgaatggcttaagaacttggcaaaatacatcacaaaggcagtatgttttatacaagtaatatgttcctgagggccttgcctaatttaaaacccatgtaattatgaaattatgccaacaactgtatgttttacacatttcaatttatgaactgaagacctccatgaaattaaagtagtataattcacttctacatcactcccctcatcttttgtaagttatgcaactcaacaggtctataatatttgtggcaggtgggacagtgcatttttttctactttgttcataaagtgagacttagaaggtgaaatttctgtgttttgatacataaaaagacctgttgcattaacgtagttagaaagtgtttccttttggttgcttttgtaggtggctccagattggaccctgcaggctcctttgtcccaaccaacaccaaacaagctctgtcaaacatgctacagcggcgctcaggcgccatgatgcagccgccttctcttcatgcaatcacatcgcagcagcagttgatacagatgaagcttctgcagcagcagcagcaacagcgacttctcaggcaagcccagactcggcctttccaacaggtttgtccagaccccagcaatggagtcctttgcattttattacctctgctagcttgggataagtttgggatatgtagcatattctttctgtatgcatatccctgtatacttgtgtgagtgcaggtctatctctctgttacaggcttgtaaatagttttcctccattgtactttactgttatcattgctcaaataagaatttgatatgtcttaggtttattaaaagtataccttaaaacaaaaagaagggctgatgactttcggtcaattagaagaagcaggccttttatccttgaggtgaccttctctgagccctcatttttctattataattaccaccatattctgtactactttcagctcttgtgttcatgtattatttttagacttattactgtgaggttatgtctctgaagccctgatgtttcctaggttttctctgatagtgccctgcctttaatttttgtttctagtgtatatttaataaggtctagagcagataaattataaacaacagtcaggatctggatacattcaatttaattcttgatttatatttctatttttgtggcctataactcaatgttcttcatagaagacagtgatccatgtttaagaaaacatcagcacttagtataaactcatgaaacacctatgcatctgtacattaaaataaagtgtgaggtgagaatggggatttctttttctagtttctgtatacttgtattttctagcttttctaaaatggtcatgcagtattttgataataatagctaacactaatagagcacttactatatgccaaaacatttctaagcactttagatgtattagctatcttaagataccagggtaactctatgagttaggtaccttcgtgatcctcacatggaaatagcgaatctacaggtacatcctgctctaagaataaccataatactttcaacatagcaagaaattcaaatgctttaaaaaatattctttgtcttttggataactttctaggcatatctccgttgtgtaatttacggcacttcctgcatttgggccacttagtgatgattttggtggatggtgatggcaaggttagtcattataaggacaagagagaagaaaccaattgaactgtatgatgacgcaagcaacagtcatcaccatgtgcttgtctcttcctgacctctaacaattaattgctttagctccctgagtgtcagaaaggatgagtctaagctgctgcttgcacataaatgatgaacatttgattaaaatatgaaaaaaaattatttaatttgcctaaataagcaacatgtttagagccatttaaaacctcattgggatttttagctcttttttgggaatcagcaaaaatagagttatactattgcttcaaatcatttttgagttaaaaaatttcactagaagttgaaaaaccatcccactagaatgaatttagccctctttcaaagtaataacgcctagggccaggcgtggtggcttacgcctctaatcccatcacttttggaggctgaggcaggtggatcacttgaggtcaggagttcaagatcaacctggccaacatggtgaaactctgtctctactaaatacaaaaattaggcatggtagagcatgccacactgtagtcccagctacttgggaggctgaggcaggagaattacttgaacctgggaggtggagtttgcagtgagccgagatcacgccactgcactccagcccggtcaacagagtgagactccgtctcaagaaaaataaataaaataataaataaagtaaagtaaaacttgccactttaattcattttttcatatctacctttttatcacaaggcatagtttttcttatttatagcccactttcaaactgttactgccaaattaactttgaagtacttgttaagttgttcctagcactagggaaaagcccactgggccattatgggtaaatatacctgtttttaaaaggttcacttcctgatataagccatgacaaacgatttcagctagaaatttttttaaagcatttaattgaataatctacatgtaatcaaagatatccttgcatatttggggaagtgtaccttgatgacaccattacttttctttctcctaccaaaaatacctggctgtatccttttgtaccaccgacagttgtactgcttgtaccaatgggaattaattgtgatttcattctttttctgattcttttgtgctaactccattacagtgttggattttttttctttattcttctctttttaaacttttaagaccagaaatgccatcttcaaatagtaaaagctccacttcataacagtgattgtacagtattcacctcttcatctcagactcacttcatattgtttttaacagttgaaacttaactatggagtctctgaagggctttcacaagtaggatatgtctttttctctcatcattcttcaagtgttagataattgaggaaaatagtattcttaaaggaagagaaatgcatacattatgcagtcacgatgtacagtgatcctgtagtacatcgagctaatgagatttgcatgtagcatccgtcatggtacctgtacttaggaggttctgaggaaatgttagtgcctttcctctcaatagatcatgtataagctattaatataactggaatttagcaaatatggtcttatggcagaaaaaaattcttctgataatccttcaaaatctaaagacagaattatatggaatgtaagcaatattgatcaattgttttaatatctgttgctgggcacagtttgcttttctagtgagtactgaccatttcgtgctatggcaggaagattttctcaggttactcacccacatatgatatgaatttctctagctacataaggactaataatatagttactttttcattttttggcttcttgtagagaaaagtaagtagatatgtttttattccagaggtccattttcttaaatataacaaacatattagagaatttccatttatattaaccttcaaaactgattttggaattcagcagatgcttttataggctgatgagtttctccaggttttggatgtgactgcttcctacgacagttttctagtaacccactggttacccccttttcttatgaggtcagacactgggctgtatactattttgtattatcctttcatctgctaagcacacggtacaatctgtgagctgtgtatcaaatgaataatgtaagatttgaacagttgcttccaggagcctaaagtttcttagtagccttaatcctcagcattctgatttttatccacacacccttctcatagctttcccttccagtgcttccagaaactgacccttctagtgacgtctgctacagttgttttggaaacctaaatgggaaaggtaaacataaattcctgaactcaggatatatctaagacctcacagagtccccttatcctctttctgtctagtgggggaagttggcatatgcagaaaccatccagccttcagtgatacacaatgaaaactagaattccataaaataaccctctagttccactgcagagattgtacatgagcttcagtcagtcatggaatattctgtcatggattgtcttatatttcctcaggaatgtgttaagacagtgtttaacacagtacctagacaacaagtgctgaatagcatggatattgttaagtattttaatgagattatttgatgtaataattgttataattgagtatatttccctatagctttagtgcatatggacatgcagaaagatgttttggcaagaaacctgttttcattcttcttggttgcagtcttcatctaggaaaatacagtagtcctatcaccctgcttatccacagggaatatgttgtaagaccttcagtgattgctgaaaccacagaggaccaaacctgatatggaccatgttttttcctatgtataggtacctatatgataaagtttaatttataaattaggctcagtaagatactaacaatatcttactaatagtaaaatagaacaattatactgtaacaaacatgtaaatgtcgtctttttcaaaatcccttactgtgctgtactcacctgttttcggactgcagttttctgcaggtaactgaaactgtgggaagtgaaaccgcagagaagtggcgactactgaaaaaaaagaactatttctatttcttactcaatatcctgtatttagatgggactcagtacaatggttacactatctttctgtgcctcagagtcccatctataaactggagctaatactatactgtacttactttatagggtagttgtgaagttaatgattaagtatgtgtaaaacagcccttagaacagtggatggctcatagtaagtgctcaaaaagtgttagctgtcatacttatcgttgctgcttattagtatttttatggtttgttatttcaaaagaaattcatttcccataacaatattattttcttaaatatgttaagctttaaaataaaagcatatcaaatggtttacttgtataattacataaattgccattaataggattggtttaatcctcatttgcttagtggttaccaatagaacaaactcataaaaaggaatgttgttttgtcatcctaattgtcattttagcttcttagagtggtgtgtttttgttctttaaatactgtgatacttgagagacttattccaatctcagtgttaaaagtatcactgtattttatttttcacatattctgttagaactatcacagaatatagaatattggttataatgcaaaatgctgctttaattattttccactcattcctttcttatactcggtatttttcttttgacaacaggaactttttttcagctcacctcaccatccccctcactctatcgatcatctagggaaggagcttgcagaaggaatcttaaggaattccttctttctttttttttttcttgagacaggtctccctctgtcgcccaggctggagtgcagcggcctaatctccgctcattgcaacctctgcttcccgggttcaagcgattctcctgcctcagcctcccgagtagctgggactacaggcatgcaccaccccgcctggctgatttttgtatttgtaatagagacagtgttttaccatgttggccaggctggtctcgaactcctgacctcaggtgatccacctgtctcgacctcctatagtgctgggattataggcgcgagccaccgcgccaggccttaaggaactttcatacccctcacaatatcgacatctagggaaggggcttgcagaagcaatctaaagttttgacccaggaaaagaactttatgccttgatttatggtgttgctttatcctgattttttctttcagtatattaaattattttatttttctttgtaataattccagacagcatattttcaagagtccaaagaaggatagacagaagatatgtttagcttgaattgattcagacaaattggttaaaaaatgcacttggttataggctccatacagatcattaatcataaggatttttcaggacagaaaagaggaagcttcctttcagaggacaggaatgtgtgcccagttatagctagtatatgtagcgaccagtacatgtagcgacttgtaaagaggttaggttatccaccgtggagcaggtcccatcatttgtgtatccaaatcaaggaaataggtaatttaaagaatgaaggatgactgagtcagaacctcccagagctgttagctccttggcaaaaatgaatctgtgacttcatgggaacatgctcttggattaccatttaaattgagtaattaccctttgttcggtaattgatctcccaccctaaggaaatggtatcaccttggaatatgtttattttctctatccctcccactcactctttaatggtatacatatttcaagcatagagacgagaatagaaaaaatgtaataatcactaatgcacttactagctttattaaataatattcttccataatgctgtagattatttttttaaaaaaaattacagatgtggatgagtctccttgtatcatcatttccctcccttcttctaaagtgggaatccccatcatgatttagcattttactttcttatgcatgtttttatacttctaatctatacgtttgcatccatcaacataaacattgtacagtattactttgtagatttgaaatgttacgtaaatgttctcacacgtgttgtattattttgcggcttttttgtagctaatttaattatttctactttatgtagttatattcattcatttatcctgttggatgttatttcattacgaatattaatatgttatttattcattctgttgatggtcatttaatttattcagtttttttgtttgtttttttttttaactgttaactgttacagtaaacattcttttacatttcttctatacatgtggaaagttttagggtgtgtacctgaacatggaaatgctgattgattttgaaagtggtggtgattcctcttagaatagtatatgagcatttttctttctccatattcccaccaatgcttggtgttatcagaccttatttttctcaatcagagcaggtgaaatggtattatattatgacatcttaatttgcattgtcctgattacctgtgagtttaaccattttttataactttgctagctattcaggttttcccttttgtaaatttcctgatcatataaatagagcatatttcaaatgatagtctcatttgttaaaggtaggcaaaatagtcttgttgaaacatattttgagtattgataactaatgtgtttattcagagggtgtaattaatatacatttcaatgacaaaaatgaacttaggagaagaaaaccactgtcctggtaaatatgtcctaaactctatcattttggtttttgggtagaaagcatgttcagggaggtgggtgcttcacttattacttatatctggtatttctctgtttatttgaatgatgaggaaggtgctgattttatttgctaaaattatgattaggcagatataatgagctcggagatagtgtttgcagcttgatttttatgagagagggcagaagattggatggaggggtgaggaaatgaatcaccaatacaagcatggcagctggatctaaagaccaatgtacaaatgcaatcaattatgtacctatatgtaaaatggtgagaataggtattatttgcctgggaaattcctcctatactttccaatcctcagtatagtaaaatgctttttctattattggtgaaatcctttgcttcatctctatctccagaactcagtgagctcagggaaatttttaacatctcagtaatatatcctttggcatttgaatatataaatgatttagaaagggactcatttagttgagaaatagcaattttccccaggtattcagttgacttttcctaaatcagattaccttttagtgtgcaaacagtggtcgcactataaatatttgctgtctactgtgattggttgaatgtgtggttaatctgatgatctcttcttacttggatttactggggatggggctaattacatccttcaagaacatatggcctgctgacttgtttacttaatgtcttgtctgcttaatgtgacccacatgtcctgagctcccccactggccctagggcgggaaggaccctagccccttgttggtcacatgggggttccaaagccccttagttgcagcacgttttggtgtctgatatctcctctacttcctttatgtcaccatttaacctccatgttgtgctattctagtatatgaatatcaccatattgtttatcagtgttgcagtctgtagtgaggatgtttgacatatgaattaataaaacccttatagggcctatgtttttaagtcttgacttcctgcaacattgttttaaatgaaatagttcatatgtattttggctacccacgtcattaggctaaaaaatcttatctgtattgtctgccattttcttgctgtcccctttctgtaggacttctgtaactctgctgtctcccttctggaagactttgacaacataatggtaacacccctgctgtcattccttcctttttctttcttttcttttttctttttttttttaataaatttttatagcattgccctttgaacgtcaaaatgagaagcaggtttttctgtagctggtaataattatagtcttcatttcactgttaactcggtttatgtttgagactgtaacacagaatcatgaatgcattgaccatgtttaatttaatggaagtttttttctgaaaatgcacccctttgatcgcctcatgatttccatcatatacatctatggtatagaaaccaatagacattcatggcctgggcttgggaacatagaccagttcgtgcaccttcatctcagtcccagttttgaacctgtctattcctgagctcttgcttctctctgtggtaatttatatcattagtagaggaatgcatggcatgctgattcataggccaatgcaagataatgaaaactgtggttatgaaacttaccctctcatcacatcccactcactggctattcccaaaatctcaacggaacacatcatctctattttctttccagtatggagaagatttttttttgagcataggtcttgtgcatgcatgtcataagacttcatctctactgctttgcctgggctagctaagaatgcatgttttgcattaaattacttataggtttctgtatcaggtagccaacccacaacataaacccaagaagcattagaataaaaaagagcacacatctcagatgtgactgtaagttaacttgtttcactgccattttaatgggtaacattatctatacattgataaagatatccttaactgcatattcaaactttgaaaatatttaggttatttaatacttgttgtataagcattttctccaatagttatttcagcaaaggaaagcttggaaacttttctgaaaagactcagtttttcttgacagtttatggtattcagggggcaggtgaggattttattgaaaaacttgagttaaactatgaagttcaaaaatgttttggagacagcttatgtttgctatagggcattgtttattattcaggtgataatgtaattcagatagaaaacaatttgcatcaatcactggctttttaaaaaatgtttttattgacagctattttatgtataagtatttaaagtcaaaagaaggttccgtgatttctatattaattcaaagtaatgaaaatgtgtatttttgctatccattttaccactcttatttttctataatattctgctttcttaggaagttaatgaatctatactcaatcagttcttataatatatggacatgctaaaatcataaaggttcattactgtatgggatgtgtttgttttagaatgaatcagactattctagcagttagttactgttcattgattcccaaccaagtcgtatttgaggtgaaaacttttaaaagtatcaagcataactagccaacaagacctcttataatttagaatttcctctctctgttgtctgcagttgaaataaaccagtatgatgtaatgaccacaacttctggttcataccatgtggtgttttagcctaaagcactcagtaacttccaaactaggagttataaataaaaccctttctgctaggtgacttgtaaaacattacccactggtttttgttatgtgccttttattacttttttccaaatcagtatttccagaaaccaagtcacaaaatctggctgtggtttttatagatataacttgtctctctacttgtaacccttaaacactactgaaaaattactaaataaggatttgaatcattactagtaaattgagtggataggaaactcctgattctaaaatgctctgattataatccttactgattgctaattggaggtataaccagtcctacatgaaaaggagatcttcacattttctcatttgattgagggtgtagttgctaatacagatcagattaagacacagaagaatgaaaattatgttcgaggatcattaaaaatttaaaacttatcggatgcattcatttcaaattatgccaaaagcctttgagtcaacatctctttgagctcacatacttctgtctaattaaaaaatacagcagtaagagagagaactcttcttataaaggttaggaagataggtcagtattgaacagcacagcttctttagaagttttttaaaaatggaaattttagaaagtacatatttatttaatgttatattttgtttatagaggtaagcccaaagcagagtgcatgaaaatgaagtaaagagaccatgtgtaggaatttacctcaggtagcaatgtagagatgggcttatacaattattagactgtcccagttctctgtagatcattccctttgcacatacaagtcaggtatctgagccatggaagcttgagcagggaacaaatatcttattctctcttactgatatgcttaaaatcacatagcacctgcctagacacaaatatgccaccaaaaaccatcttcctgcaggctggatgcagtggctcatacctataatcccaacactttaggaggccaaggttggaggatctcttgagtccaggaatttgaggccgcagtgaagtatgatcttgccactgcactacagccttggcaacaaagtgagatgctgtctcactttgtgtttcacataaacaaaaacaaacaaatcatgttcccatatagttctctccatgcattaaaaaatatgaagttaaagtggcctcagttgttttggttgagcagaataaatagggagaaattaagttactcttcagatactaatgctggcaggaagaagaaatcattagaatgatagatgctaaacattaaattaaatttgagttttcaaaagatggagctgacaactgtgaagcaattagaaagcacttggtaaagtaattgatgctcaaacataaatcctaatttgcctctggatttcttggttaacagataaactaaattaaatcttagttattctgaacagatatttactgagcacttactatatgtgctaggcactaattaaaaataaagcttaaaaatttttcagaaattaacagataactaaggtgaccagatgtcctgatttgccaggcatggtctcactttgccctcttgccctgtcttgtcctagtttggatgacatgttagatagtctgttcttggtttaatgtggccaaacccatgcctaccaacatttaaaagtttttttactaattctcagtctctagtttcctttattattcccacattgtggttcttatttaacatttgtaaaatatttcaagttattaaagaacttattcattctgttctcaactaattgaactgtttctacaaattgaaataatgtgttcctgacattattcttggaaaaacaaagaaaagtaggaatccatttcattctgataggagagattagggtgttttctttttaggagcacatgatgataacagctatgcctggcaaaattgggaagtgctagtcaaatagggatgtttgtgattttctcagggagaatattgcatatctgaattattttccatacttaagtagtatgttgggacaaactggtggtcaggaggaaacataatatgctcacatataaatagttcacctttagacataaaggtggaaaatgttagggtgtgtacctgaacatggtataaaactatatacaaaaactatatttccatttgtatttctttttccttttaaaagtatggcacaattttctgaatgttttgtgatttttaaaaatgtagaataatagttttcagtttccatttcttcttcttcttttttttttttttttgagatagggtctcattctggtgcccaggctggagtgcagtggcacgatcttggctcactgcaacctctgcctcccaggccaaggaatcctctcacctcaaccttccaagtagctgagactacaggcacgtgtcagcacatccagctaattttttgtattttttgtagagatcagatttcaccatgttgcccaggctggtctcgaactgctgggctcaggtgattcacccgcctcggcctcccaaaatgctgagattagaggcgtgagccaccgcacctgcccagttcctatttcttaaattcccatgatctcaattaatatatgtaaataagaatattgcccaatagctcagatatataccttattagtattctagctccccccaccatgtaagtcataatgtgtttcataaagttcttcaataaaagcaaaagaagagcgaagagttagaaaacatctgctttatgcatctgaatgcagctgtcacatgcagatcgcattctgcttcccacaaagccaaaagagggcacgagtgttataaactacctatagatccctagattctaactcatatataaatagttgatttttctgttttgtaaaaatggtaatatacatatatttgtctctacaaagaagcacaacagtatgtctcagggaccttgtatgatgctagtgtccaggagtggtctttaaggatctggttgatttaattattccttggcatagtgtttggaggatcaagagccatttggattctttgggaagaacagttttaggctcctgatggtcatactgtcatggtatgtgttctcacagaggaagtttgggctatatttctctaacccaagcaaatggagatacaattgtttttttaacagattaatgagttagagactaagagtatcttcatgatagcctactctgaaagtaagattcttgtatgtataaataccctcagaggtacactcaaaaatttatgtttcattcatgtgtagatagatagtcacctagagagatgctgaagtttcgtaaatggccacgtgattttttttgtggggatcagagaaagggcttaactgtcttaggtatgcatttggttttggtatctcattaataaggcttaatagagattgtccttttggtttttcattaggatgattttaagaggctatatgtccttaaataataagcaccaaataagtattttcatccttaatgtcacacatggaggcatctcatgataatggaaagagccctaggctttcaagtcagacttcctggagtttagatcatggcactgccaggtcttgctgggcaagtttgctaagttgcttaagctctttgagcctggcttttcctgtctgaagaagatgagaatgatgctcctttcctatagggttcttgtgagaaaatgagagtaagaaccagaagcccagcctctgaaatatgatcgattcttaataatcgttgatatccttcctcttaagctacatatttatccctttctccctgctagaaatacctacactacttttcaaacacattaaaatagctttatgtaactataatttagcactttttaaaatgagaatctctgttaaagacagtagtaaaataatcctacaataaatctcattctttacaatcagtaagtcctgaaaaaaaaacagagtggtaggaaactaggattatttttatgattattactgcaagcttccatgaagtaacttctgccaccaaaacataaaacacacataccattgctcttgtgaatatatttgttttcttatggccaaaacatgtattagattaagattggtgaacagatgttaattggttttattttgcattgtagttggttggaattatgtttgccattaacttacaaaatttatcgactatattctcattgatttttagagtcatagaaagtactaaatgtattccttgaatatctggctaaataggcaattagtaggtcactgtgaagaagcttcattaaaaagtcataaaaattttatatgccaccgtgtgtctgtaccacacgttctcttccctttataggcactgggtagtgcagccctgtggttccagatttcacacttagtgggacatttataccctggcatgtattggaagccagctgacagcctctctgctgagcagaccattgataacttaggcttgtatttatggctttgttatcattgggaaaatctgtagtcttctttggaaggaataagttcaacagtctaaacacataggatattgatgagaaataatatttaatacattttgaaaatctttgagttctttatccatgtaatgagattagatgtgggttatttggattattaaccagaagctcaaatcaagcccttgctgttatgatcaagagtttgctttggctttgttttccagggccagccgggggaccaggctgctctctttgctgcgcaagcacggccctcccctcagctccctcagtatccagggctgcagcaagcacaggtacccacatttgctttgtaggtactgacaggattttcaaagctctttattggaggtgggaaattaagtaaatagaatatatcaactccctatagggtctagaacttgattacttcttctacttatagattataattgatatttcaaaaaagcatgatcaggattgttgaagtcttaggattgattaaggagcataaaacattctagaaaaccctttaaaagtgtaaattcaaaccttttattagtgatgattatagatattgaaatacttaacaatcccagagttacttcttttatgttataatgtataatgatgtaattcagttttgaagtcatcatatttgggctggactcagtggctcatgcctgtaatctgcactttgagaggccaaggtgagaggattgcttcacccccagaatttgagaccagcctgggtaacatagtgagactcagtctctacaaaagaaaataaaaattaaaaaattagccaggcgtggtggcatgcacctatagtcccagttgcacgggaggctaaagtggaggatcgcttgagcttgagaggttgaggttgcagtgagctgtgatctgttgccttgggcaacagagcaagaccctgtctcaaaataaataaataaatagaaattgtcatattcaaagatagcatcaatgaggaatcatggtagaataagaaaataacggggcttgaaatcagactttggcacagttcctagcaacttactagctgtgtgacattgtgtgagttacttactctgagcttcggtttccttctctgtaaaatagagatgaagtgtatgaggacaacctatggaacaaccagtggaactaacctatggaactaacatagtgcctgatacacaatataatgcaaatcttgagctacttttactaataattttgctatttctgtattcgtatactctcaccccatccctctgggaatcaggaatgcaggggtgttggcaagattgctagttggattgacaattcaatctatgtccacagctgaaagaaaagcccacattggcctacacaggcactgcgtccttcagcctggatccattcatgctgcctgctagaagttcattatccatttctctgtcttccaagtcagaggcattaaactacctgaaaatgtgctttgaggatttgaagagcaatgttgttctaccttaattagcattgtgttctataaattgtacctagtgatccaacagaacttcaggtttctcttttccataaggtgacaatacacaaagaactaggtacttgtatattaatattcattaggtaaattaagtgttcacattattagtagagtgccaaactaggtccagcccgtactagaggataatgaacagttaccaattgcaccattcctggctaaggtattaatagttttttgttattgttttggaactggttagttactacacacacatttatcagacctgaagaggtgtagtcacatactggaaaagtgtatttcattattttaatttacatttgagcatgggtagcttttctaattttggaaatgatattaataatacttcatctgttgaactttggtgtcatctgtgcactgaagatttagatgcttgcctgattgtttctatatagaaacatgcccttctctaaaaataagcagctaatcttaaaagccagtttaactaaatgaggattcattttttttaagttgacatttctggtgagtcattacacagccagatcattctgtggcttttctgaccatattccctgcatccagggtagtcctcctcaaattttgagttatgagaacctttgaaaacagtgaatttcaggggagtcctcatgggtttgtttttgccccatatatcgtagtgatgggaaagctaggtgataagttgaaacattgacttcttcccttgtgcctacctgcagaccatgccacagggctatacaatgtatgggacacagatgcctttgcagcagacatcgcagcagcaggctggcagtgtggtcctgtctcccagctataactccagagcctatccggccgcacattccaaccccgtgctaatggaaagactcagacagattcagcagcagccgagtggctatgttcagcagcaggcctcgccgtacctgcagcccctgactggctctcagaggtgatacatgtggaaatgatgatggcaataatgaacagtcacattctcgggtttcttatgcttcttatagggcatggtactttatcattgtttttatgagcttgcatatttgcagataatttgcattctgtcatctcgtttttagtagtatccagatagaggttcaacataaagaatgctccatcttgtttatttcattaaagatccttacagttttgactcatgtcttccaagacatgagtgtaacagtctttacgtgatagtgtgtttgcttcagtgttcttttttttcctcttcttttttaaaaattctctgaacatatctaacagagaaaactcttgattattgttaggaatgccttactacaatttgttgattggagcaataaaatgtgtgattgcaatactaattgtgcatggtgcacatgagagttttgttataacttagtttctaccttttccacctcaaagatatttggcaaaacaggattatgatagacttttttctgttcttgtttaattagatcccttagagtgtataactgtactgtctgttgtagtagctgccagccacctgtggctgtttaaatttagactatttaaaattaaattaataatatagttcctcagtcacactagtcacatttcaagtgttcagtggtagccaaatgtggccagcaggactagcttcaatggtgtgtgacgtgcactgtgtttagaagggcctgtgtttaaaaaggcttcatgcttagtttaatgctctgcagtttctctgtggaaattcttactaagttttgatcagggagccttgtgttttcgttattcactgagaccccaaaattatgcagttcgttcttgtggctagtagttatcttattggacagcgcagagagaaaacattgcagccatcatagaaagttctgttggatagtactgtcttagcagcatcatgtaaaacgtgtccatctagtggatagcagcacagctcccatctgttaccatcaatggctgcatgacgactccaagtaatcgctctttggaaagttagcaaggttgatggtaacacatttgagaaaatagatattttggataataatttggaaaatgtgcattgtatgtacaatttttataataaatagcagcatagcatggcccacaaacttgaatttcaaagcccaaaagttctgggttcaaatcccacctgtgccatttgctttcttaataagttacctctagctctgttttttcatttttaaagtagggataacgaaactgctgaccttaaagggctctctggtggggagtaaatgaagtaacacatttcagacctttagtacagtgcctgcttcaaagtaaatgctcaattaatattcctcgttgttaaaaactattaaatgtttaaaaagtgatttattgcatgactgcaattttaccttaagtcatgtgcttgctgtactttttcaagtggtcacatctattattttaaccactgggctttagtctatttgaattgtgcaaaggattattgagcactgattgtttcttggttggtgtatgtcatgtgctggtagcactgattaaaagtttgacattatgcttgggcctgaaccaagttgcattattctttgccagactgaaccatcaggctctacagcagagccctctggtgggcgggggaattgatgctgtgctgacttctgcacatccaaaccttccctccgtgcccctgcctcaggatcccatgagacccagacagccgcaagttcgacagcagcagagactcctccaggtacggggcagggagatgagggcaatgccatcacccttcagacagtgcaaatatgcaacagtcataaaaaatgaaaaacactatagttgtcaattgccagattccaaggatccctgtggatttgatgctaggagctacattggtacaatttagttacaacttggcaagaattttattttctctgtgtatctaccaggttatgggcagaagagtacgttttgcagaacattcttcccatttcacaaaggtttgggagggcagacggatgcctttaatagagttggcctcagcttacccagtctctgtttaactaggagccatgcaaattttttaaaagtgtcataaatgtgaaaacaaaaaactgagccatccagagctttcatcagattcctagagcattctgcaatctaaaaacatttctataacacctctggtctgataaggctgtgaaatgggaggaacatagactgtttcaaaggatatttcatcttgtctttgttagaatccagagaactgtcattcacttatttgatgtacattttaagtcagttagataaagggttcttccccttgatacatttttttttttttttccccttaagacggagtctccctctgtcacccaggctggacaacctccacctcccgggttcaagtgattctcctgcctcagcctcctgagtagcagggattacaggcgcccaccaccacccctggctaatttttttgtatttttagtagagacgggtttttgccatgttggccaggctggtctcaaactcctgacctcaagtgatccgcccacctcggcctcccaaagtgctgggattacaggtgtgagccaccacacgcagcttccttgatatgttcttgtttctgacttgcttatttaaaaaatataggccattatgtttacctgtgtcatttgtcttcaatattaacaagcttgtcctatgttattggactggagatttcctaaggagactgtacagtgggctctaatcttatcagcagtccaacttgagatacacacttactttatatactaccaagaacagaacaccaaaaatgaggaatctagtagagctggagtgcccaagggctgtactctcaactcggtatgaggtcagtgagaagtaaacctgccatgcagaaagggacacaaaggagcttggatgtcttatccttgacactggatagaggggagaaacaaatatctcccctgagcatttgaaccacaagctccggtgggtttgagtctgaattcagtgtgatccacaaaattctggttggtagtgcccaggtgacaggcaaaagccaacacaccctctggaactgggcttcccaattataagatgccattagtagtaagatgtcattagttccatcccaatttgtgacctgttaaaaatgttaaaaaaaaaaaaagttgtatcacaaaattgataacatgtggtaaccgattaggagagtatggccttcagatagcaatctcagtcattgtatagatgttgtttccaatggtaaaagctctctaatcctgttttgtcatggaaatacttatagtacctatctcttaaatatgtagaaaggattaaataagaatattcaagtaaaccactcatttgataattttacgattaatgttatgactattatcattactatgagtactcactttcttaaatcattttttccaagttctgaggctatgtttcagaattttttaggattgataatttatattttgctctagtttagaatttctcatttccaaatcactgaggaaagttaccacattatttgtttacttaccagttttaaatcttatgttggtgtttttcaaggctgcaaatacggaaagccttttcttattagaccatatgtactttttatcctaattagcataatatgtccttctggtaattttttcatcatcaacacattcttccctggagataagtgatttgcttctacaacaggattatacttcttttttggtgactggccacctctgtaaaggaaaaagttaataatgatgaagttgggttaatttttcttagaagaggttctagagggctaactggagaatcatattgcagtcattgtgatttgggtccaacttgcgttgttcttgttgggatcatgctacccagacctctgctaggattccagatccatgagcattgtcacttagtgagacatgccatatggcaatagctatttattagttggctgtaaagcagaccagtaattgaggggatagtatgcaaaccaagttggaaaagtacaaaagatgaagaaatgtctagactgtcatcattatcaggatgaagtgtttgggtggaggaaattttaaaggtcattgaaacaaaacaaaacaactattaatatttttctctcctctgtgtcccaccttgtggatgtctggtctgtgctttttctgtgacttggaagcattttccaagagctgtgtgtttgagccaaccctgttactgacatgatttctgaatttctgatgtaaattatgccagaaggtgtcatggcgactagtctgcctcttccttttggaaaaaaacaaaaaacaaaaaaaaacctttaagaattctgccagatatcataaagaatgagaggattactactgagcagtccctgtccaacctgtagtgtaagaagggataaaacatgcggaaggacaaaggacatgaaaggaattaaaacagtaagcagaagggatggccccggacagcgcagtgtggaatagacagcagtactgactgccagtggaagagatccgtagggttggggtggtcctagaaggcttcatggatgagcaggtttaggtcttgccctcaaaaggacgaatgaggttcagcaaggtagagatgcagcaggcaggtatatattgtttttactacaacataaaaattagataaaaggtatatgggggaaacagattcagcaatgctgttttcttcttccttttaagtgtataacatttttaccctctttccagatgcagcagccccagcagccccagccccagcagcctccccagccccagcagtcctcgcagtcccagagtcagacccttggtctccaagcaatgcagccccagcagcccttggtaaggcctgttgttttggaatcagacatgtgggtttcttctttaaaagcaggttgcattgttcatgttcataagattgttaagaatcgacaaagcctaagtataccctaaaaatttttcctagaactttactagagttttattgtcattgtagttggtatatttattttcataggaagatacaagtaaatatttgggattcagtaggttataccattattcttcaaaatttttcggactgttccacagacaaaattttttacattgagacgtggtctttttttcctaaacaatgataaaacgatgatttactatgtatgtttaaaagattgtcttaccatactttgatttttactataatctcaaaaaccatgggcgcactttctaaaatattatctattatcttcaataagaaattgtttttcattcagttagcacttgctgcaagagttttcatgtaactcacagtcggatagttcacttctctagcttcataaatcaaatttggaaatgtcatatgcatagccatcaaagttttctaaacctcagtcatttacaacagccatattcctgtttcattaattacttttttttaaactgtcatcttattatatttgcttaaataaatgtagttttcaaagaagcattttatcattaccatccataattatatcacttgccacatattggaaatatctgtgaaagtaaatacaaaaataatttagaagggaatctccatttaactgagtgatgtgaattgcatgaatgagccctacctacgatgagctggctgaccgctcatgtctcacactttgagaaacactagtgtagactgccttcagcacaggatttttaaactagctggtttcacaacttgtagaaaagggggaacaacgtggtatagagatagtacatatggagggatcagagtagagttaggtggttaaagaactgcgtccaaatcagattgaccagaacatggtcaactggaatagggcatccatagtacatttaacaaactctgcgtaagccagtttgttccgctcccccagctccccccccgcctttttttttttttttttttgagacggaatctcactcgatcactcaagctggagtgcagtgcgatctcagctcactgcaacctcctcctcccaggttcaagcaattctcctgcctcagcctcccaagtagctgggattacaggcacctgccaccacacccagctaaattttgtatttcaccatgttggccagactgtggtcttgacctcatgacctcaggtgatccacccactttggcctcccaaaatgctgggattacaggcgtgagccactgtgcccggcctattccccatttttaagttaattctttttaattatggatctagtttttccagctctgatttaaaaatatatatatgtttgtgacatttactgcaatctacttcagaaaaccttcttaaagtagaggtagtatgtaaaactgcactgcctgcctacctatccaatgtgtattagcaggaactggctgttacttagcaaatgttgtagaagagattcctttggatgcaccactgttagctgagtctagtgtcccgtacaagaacgagatacaccttttgttttgaaataatttcaaatgacagaaaatttgcaagaatagtacaaagaatttccataagccctttacccagatttactaattcttaacattttgtcacatttgctttattattctctctttcactccccccacctactgccatttaaacatacatgtgcctctttacccttaagtactttcacttttttttttccaaaacaaagatattcttttataaaaactgggtattattaaaattaggaaattgaacattactacaatgctttataacctataactcttttgcagatagacaaattaatgctctttattgcattgattttctttttcccctggttcaggatcatcacattttgcatttggctttcatgtctttttactcgccttcatctagaccaattccaaagctgcctttttgtcttcatgaagttgacatttttaaggtctatggaatgtttattttgtagaatgctactcaatttgatttatctgcctagattaatcatgattagattcagattatacatttttggcaacattagaggtgccattgtgtccttttcagtgtatggcattaggatatacattgttggtgatattactttaatccttttgtgtgtcttgtgtctgatagatctccccactgtgaacttattattttccctttgcaattaataatttatgagaatagtttgataaatctgtcattactcatcaaatcttcacacactactgttagcatctattaaattattcttgcctaaattcattcttactatggatgtggaaaaattatttttttttaatttttaattcttttaattatggatacataatatttgtacatatttatgtacagatacgtgagatttcgatacaagctttcaatgtgtaatgatcaaataagggtaattggggtacccaaaatcgcttcaagcatttctaatttctttgtgttatttcgtgttgtttgtgtttctttgtattccacttctactcttttagtgattttgagacatatagtaaattattgtaaaccactgttgccctattgtactaccaaacactagttcttactttgtaatgggtacaaaatggtgatttttcttactcttatgtttctgcatttagcagttggtatttgtattagttagggttctctagagggacagaactaatggaatagatatgtatatataaaggggagtttattaagtattaactcacatgaccacaaggtcccacaataggctgtctgctggctgaggagcaaggagagccagtccaagttccaaaactgaagaacttgggagtccagtgtttgagggcaggaagcatccaacacgggagaaagatgtaggctgggaggctaggccagtctctcctgttcatgtttttctgcctgctttatattcgctggcagctgattagatggtgcccaccagattaagggtgcgtctgccttccccatcgcactgactcaaatgttaatctcctttggcaacaccctcacagacacaccgaggatcaatactttgcatctttcaatctaatcaagttgacactcagtattaaccatcacaagtccaccccttgtctacttgagcccatacacacctcctgagatcagacataatcttcaaataaagacaatagtaaggtcgtaattacagctaacataatacaactatccttcctgcaaccggaaacgcaccaatccccaacccaaatactattacataaagttaacaatgcttaaatcctgatatgaagtcagtaaatcctatgtcacatgataaaggaaaaggaaataaaattaagatattagtacaagtgtatacctgcacaaacatgtttttaacaaaagaaggaggaagtactcatgacagttacagtccgcttttctgccactgtcacgtggtcatagccggtattgatgactaccttcttctgctacccattctgtattcccttcaccttcagcaagcacctcagcaggtcgtgtttttcttcctggttgagtgacccaaagcattcctgaggggtctggatcatttgtagtcctgtctggtttgggctgttgtagtttcccattgaccttaatcacagggcatagtaacactaagagacgccctaatggatctcgtgtattccatgaatactcttccttacctctattgtggaatagtagactgatttcatcttgatagtccgggtcagtcaccccagccaacactgtaactcccttcttagcctgttggcttaaaggtaggaggagcccaaagtgtccaggtggcaatcttaatttccagtttaatagaatcattgtattcctagtggcagtgttcctccctctggaactaagacctctaggccagcagaacgtaatgttgtgggaacaggaagcaaaaattttgctagtggatcactaggagtgatggtgagtggtgccacttccacttctaccccttgattcctggacttgtgaatcctggctatgggagaaacagtactatatattggatactgattaagagcatacacggccttctggagaactttgccccagccctgcaaagtattgtcacctaattggcattgtaattgtaacttcaaaaggccatttcaccattctgtcaatccagctgcttcaggatgatggggaacatggtaagaccagtgaattccatgagcatgagcccaccgctgcacttctttagctgtaaagtcagtgccttggtcagaggcagtgctgtgtgggataccatgatggtggataaggcattctgtgagtccacggatggtagtcttggcagaggcgttgtgttcaggataggcaaacccacatccggagtaagtgtcttccagtgaggacaaacctctgccatttccatggtggaagaagtccaatataatcaacctgccaccatgtagctggctgatcaccctgaggaatggtggcatatcgtgggctcagtgttggtctctgctgttggcaaattgggcactcagtggtggccgtagccaggtcatcctttatgagtggaagtccacgttgctgagcctgtgcgtaacctccatccctgccaccatggccactttgttcatgggcccattgaggaatgacagtggtggctggggaaagaggctgagtggtgtccacagaatgggtgatcctatccacttgattattaaaatcttcctctgctgaggtcacccattggcgagcactcacatggaatacaaatatcttcacagttttcaaccactcagagaggtccagccacatacctcttccccaaatttctttgtcactagttttccaatcatgcttcttcctgtgctttactgtgttttttttttgttttgtttctttgtgtttggagacagtgttgctctctcacccaggctggagtgcagtggcgcaatcttggctcactgcaacctgcacctcccgagttccagcagttcttgtgcctcagcctcccaagaagctgagattacaggcacgcaccatcacactaggctaatttttgtatttttagtagagatggggtttcaccatgttggccaggtgtctcgaactcctgacctcaagtgatccacctgcctggacctcccaaagtgctgggattataggcatgagccaccatgcctggcaagaaaatttttatatatccttttatctttcggtatttttctttttcttaatagttccactaagatgcattgtatgtattataaatatatttatttatattttataaacatctccagcagattcagttcttggtactagccaaagctcttcattctttgtttttttctttgctagagaagagggtggtaaggtagctgttgaagataagtgaactcttcctgttttggggttctgattcatgctgtatcaaagtggtaatggtaacacattgccccccatcccctgacttgtcctgctgctatctggtgacattcacagttgaattcaataaatgcttttttcttagggtagtgcagaagtgattgcagtcgtgtgtgtggtggagaccagcaccctgccagatgttatagagcgtgccagtgaaacatcacttcctgccactagaggacttagaatcataggaagtggctcaatggcagcactgcctgtggaaagtagtttacggttgctgaatttttgacagaagagctggaggcattgtattagtttgctagaactccctaacaaagtacgcaaactagatgtcttcaacaacagaaatgtactgtctgttttggaggccagaaatccaagattaaggtgtcagcagggttgttggttccctctgagggctgtgagagagaatctgttccatgcctctcctccagcttctggtggctcgctgggactctttggcatcgctcggcccgtggaagcagcaccctgagctttgcctccaccttcgcaggcattctccctgtgcatatacgtgtctacttttttataaggataccagtccttatgcattttcactttttataaggacaccagtcatattggtttaggtcccatcctaattatctaatttcaacttgattaccactgtaaagaccctgtttctaaataaggtcacattctgaggtactgggtgttacgactccagcatgtcttttttagggaacataattcaaccgaaataataacaggtcagaaggtgagagaagtttgggaagccttgacagaggaggctgaatgtggcagatgttgaaggcagtaggatttgattcattgctttttttttttttttttgaaaagaagaaattgaatgttaattttttttagagttagaattcaagttttatttagaattaatgaaaatatatttttttgttcttttgttgctgttgtaagaggaacagaactaggttttttttttttagcttttgcacaagtcccttctattttaatgcattctaggagatcataaaaatatatatatatatatattttgaaacggagtcttgctctgtcacccaggctggagtccaatggtatgatctcagctcactgcaacctccacctccctggttcaagcgattctcctgcctcagcatcccgagtagctgggattacaggtgcctgccaccatgcccagctattttttttttttatactttaagttctggggtacatgtgcagaatggattcattgctttttgactattttgttcatctctttgctcgttgacgtcatcagctgggatgtgtgggacaatgatcatcccttggttttggctgtaaaaaatcactttaaaaacttataaaaagttaacaacttgtaaaaagtgactcagggcagaaattagtgcttctttaaaacgtgtcaccagaaaacagagtttttctgtgaaaagagcaagaaagactaagaaaagcctatgtttacaaattaaatctggtctggacttaatatcaatgcctgtgttgccatctacttacttaagttgcttgtattctgtgaaggaaaaacatctggaaataaagacatgggtacccttgctgggaaaatatatttggcatgtctgattttggcctaaattatagttcttgactagaaaaatatttttaatgcttattaaatcattaaataattttaatgcttcttgttgtgattaagttaattcttaactaaatatgttgacagaccatgatctattctttaaaactacttccagtgttaagaaaataacgttaacaccatcccgctgcatcatttcctttcatcttaaactcaggttgtcttagtttggtgacttaaaaaaatatgctaacagaaagctttaaatagttggctttttacatcgactgatccttgtgtccgtttcatattatattgaatatttgccttttaaaaatatgcataatggtagcagtagttacttaattacattaaattttagtcagtgatcacttgtgaaattgtccttgactcttcctcaagaaattcatttgttccattcagagaaattgagatattttttcagtctgcctctggaattgggaagtagcaggcacagataatatgattctccttttgaagtggaagaaattaggtccagagaacattgagctacgttgccttcctttgcatgaatttggaaaatttttttttcttttggaaggaaaagaagaagtaatatttatagaaagaggttggggaagaaatatcaggagatttctggtaactggatagccaatatatttgatatagtacttttttcttactaaactgtgtacagattagatgactctgccggatgcaatggctcacgcctgtaatcccagcactttgggaggctgaggcgggtggatcacgaggtcaggagattgagaccatcctggctaacacggtgaaacctgtctgtattaaaaatacaaaaaattagctgggtgtggtggtgggcgctggtagtcccagctacccgggaggctgaggcaggagaatggcgtgaacccccgggaggcggagcttgcagtgagccgagattgcgccactgcactgtagcctggacgactgagcaaaactctgtctcaaaaaaaaacaaaacaaaacaaaacaaaaaaactctatgcaagttactagttaccttgaaaataaacacacaaaaaattctgaaacacatcagctgctagctctgtctgagagtgtggactgagagtgtgccgccctgtgagagtggagatgtggctgagtgcatgcacaaccctatacgttgttgttccttccgctgccgcttgtagggacggacgaccatgcttcattcgtcggagcaatctgtggactctgtcagttggtagtgcagttttaaaataaatgttgctttgctgctttgttcttttggtaacaaatgaagtggtcacagcaaaaacctcttaactgtcatgagggaagggatgtattttactctggtgcccttggaacccagaagattgcctggattttgataaatatttgttgaatgactcatttgttggatgtcaaagcaatgaaaaaaacctttgttaaaatcacacattatccataagaaagggaaaacacaattcaggaggcaaggtgtccagaccatctgagcatcggtaggtccattactgaatcagtcctgcagctgattttgtcagcatatgctttcgctgacggggcaagctcaagttttgagacaaaaaatatttaaatgatgtttatttaaatagaaattactaattagcagcacatttttgcctatgctgtgattgagcagaagaagtaaatgttattgaataaaataggaatttagagatcagtcaaaatacatcaaaatacattatcagaattttaattttaatttattttagagacagaggctcaatcttgtcagccaggctggggtgcagcaatgtgatcatggctcactgcagtctcagactcttaggctcaagtgatctttccacctcagccttccaagtagctgggaactacagtaaatacatttttgtttttgtttgtgtgtgtgtgtgtgtgtgtctgtgtttaattcagcaaacaatggtatttcctggagaagtggttataccatgttgattagttatacctgacattagtaagctgggtattcggtcttgtggttacagcaggagcatggcatggcttctgcctctgagaagtaaaaatccagaatcctagagagagaagcaattatcatgttaaaccatatgtttgctaatagaggcatttacacagtactaaggatacaaaagcagtgattcactctttaaatgcgtgagggaatggatgataacttcagctgatctttgaaggatgagtagatttatgggaagggtagagtggaacgaagtggggaggaagtgtattccaggagaagggatgaacatctgcaaaggcacagaggggagagatcatcttctgtatggatatgggccaaaaaatctttcccacttcatttatcacatttgaatagggaaggcaaaacatacatagattatgatttgggggacctctagtaaaccttactgaacctatttattgacctgttttggtaaattaaaaattcaactcccaccacagtgatgattccaaaatctcaccaggcacctgaatgaaccacttgggggagccattttaaaaattcagatttctagcacattagctacagaaattctaattcaggaagtctagagaggagtcccgggaggataatcctttaaatttcccccagtgattttgtgctgcctcagccacatacagggttcagttcttcacaggaggggttcagtttgaattgaaatgctcagtagtgaggcttctgtagggtgttggaggcagccctcatcccctagtggtaggtgctccagagcccagagaaattgcatctggggcctattgcctgtgcatgtacaggtgaaagcaagttaaaattagtagccagaggccttgagaggaagcagatgtggtaaaacactgtaagaagattgtagatatagatcatgtacttctggtcagtttaaggaagttggtcaaatttcttggcctcagaatcttttcatgttcacagattattgcagacccaaagagcttttgtgtatcaatatttaccatgttagaaatcaaatatttgttaatactaaatattgttatgtttagtacctaaagataaacttatgttcctggaagtaacatgcttttatgaaaaataggcatatatttcaaaataaagttatatgagaatgacatggttttacttttttttttttttgagacagggtcttactttgttaccctgactggaatgcagtggtacgatcacggctcactgcagccttgacctcatgggctcaagtgatcctcccacatcagcctcctaaatagctgaactacaggcatgcaccaccatgcctggctaattttagtaattttttgtagagatggcgatttgccatgttgcccaggctggtcttgaactcccaggctcaagctgtctgctcgccttggcctctcaggagtgctgggattacaggtgtgactcactgtgcctggcctggtttacatttttgaaaatttcttcagtgtctggtttaatagagaacatttgatttgttgtaatagcacatgttatgtaggctctggaaagctgtaatgtacgtgcatgagaaaataagtgaaaaaagcagataatgtcttagtatttattttgaaaatggttttgaccttgcagataacctgacagagtcttggggacctctcccaggaatccctggatcacaatttgaggccctctgactatgtactacctcttaagccaccctcacaccaccctgaactccccaacacacacacgcatacatgtgtacacaagcttcctagggtatacctagttactgcttaggctctgcaaaatatagtatctgaggcaaccactacagtgttttattctgtgaaatactctatttgaagcaggctttaaatgaacataaagaaggcagctatgtgtttgttgagtgaataaatgttgactatttgtacaccatgtaccccaatatgctgttcaatcagcttagacatctttatagccagccttttagaatctgtaattatttctgaataagttgatatttggaagctggtattttcaatcatggataggcttgaggggaatgtagtggttggtcaaagggtccaaagtttcatttagacaggaggaataagttttgttgatctattgcatagcaaggtaactatagttaataatgtatattccagaattgctaaagtagattttaaatgtgttcaccacagtgaaataagtctgcaagatgatagatgtcatagatatgggacattttctgggggcagcagtcttaaccagtcagaagtgaacagcaaaatttgacatgaactcattggtggcaaaagctgacctgaatagacatgaggctcttttcatttatcctacctgatataattattcatgtgcttgctacagaaatgtaatatgcttgattatggagtgctgtcctacattttgcctggtctgcatattaggagtgtttcttagtaaactgcatatgttcagattccaaagcacatatctgtcttaggactttggataagagattgaggacagttacagctaagtcaggattaaatatgctaatagacacatagaatgtctggaacagtacctggcacatagtacaatagtttccccaagtaagcataaaaactattgaatagaaaagaatactaacatttccatataaatgaaagattgatttttatttttcactcttgatttgggcaatggaaaaaaatggcaagctgctgcttctctaatttgtattggggaaaatagtaacattggtggagggaatagttcattagttttgtggatctttcttgttattaggaaagttgtgggaattgaaggctcttagaattagtcattccatcagttgctactgagcacctgctgtgtgcctggcagtaccggatattacagatacatcagtaggtatgccaagcccttgtctttcagtcactcactgtctagtgggagagagaaagttgaaccagctgtcatgccaaatattcagttttgaaagtatcagcttggtaatgccctctaaatagaggataagacaggattgccacataaaatacacggctcccagttaaatttgagtttcaggtaaacaatgaataacactttagtgtatatcccaaatactgcatgggatatacttgtactaaatgcagtatttgtcatgtgcaatatttgggacatgcttggaactaaaacattattgtttatttgaaaatcacatttaactggacgtgctgcgtttttatttgctaaatctagcaactgtacttacaatcctgggctattcttgacaagctctgaggaggaaatagatgttgcactggcgttgggtaattgaagagtctttttcaaaagacaaattacaaaggtatggaaaaccagctggaggtgatggcccactcactgactgcccctaatcccagcgggacaagaaggggagagaggtagggaggctacctgacaggagctgcaaccttcccggtgtggggcgtggccagccagcagagactcatggaggaaaattggcaaaaacaaaacttcactctgctccctcccagcctcactgtgctcctatgctccagtctcctgggagcacctcctccccacctagaagtcggagggcagaggagccagccttgttgatgccctccacacaggcagcctggtgagcacacggagagtgggcacatgggaaacagccagcaccgtgctggtgtatgtgcctgtgtcagaacgcctcgtttatgacagtgacagaccaggaggagagaagagggttggaggaggagagaaggggaagaaagaaaaggagaaaacgatagtctgaaatttgaagatcaagataaaaaagtaaattggcactaccagtgattctaaccaaaagtaattttgcttctggtagatgctgctttttttcctctttggaataaccacaatttcttgcatcaacttaatagatagaatcagggcatgtggtcccctatattgtgcctctcatctgattcttcctacagagcctgtatttgcatggccctgggaattagcactttcttaaagttagtgcctcactcactcatcctgcccaggcccgggctctgagggtgggattagcgaaccttcatcctccatcatatggggagggtatagtcccaaatgagccctagtcctagggcaccaccctgcctcaccagattattttctcccatttgtgcaaggcacaacctgtagtccttgaacaaatcttccaaccagagagcttttattttgccagtattaatatcatgatactcatgagctagctggtgaagggtgagatgaccaggatctttgagctgctgagctacgtctgtagtgtggagttcttcattggggctcttcaaataaatgccaactaataacctggagcttgggttcctgaatagatggggtacttcagatgttcaccagatgcacaacaaggtgtagatgaaaattaatccacacacagttgtcatagcccttttttcgtgaagtgttgagaagtaccttacagactggccctgcgagttagtctctgttcttgtctgtgattggcaccatggaatgatttctgtcctttctcctgtcgccattacagtttcccaggcaaggcttgcagcagacccagcagcagcagcagacggccgccttggtgcggcagctccagaagcagctttccagtaagtacccctgtgtgtcatggaacagacagctcccggaaaattaaaaataagccagcgaaacgtaaagtggcggctctcccaagatggtaccatcttcctcagtacaatgttcatgttatttggtttagcccaaggtattttcattctgtcttcgtttggttttggcttgaatgcttcctttcctgggaaagccccaatttttctcaaattcagtgaagatactttctttttgcttccaccagaatctagaaatatttcttctcattggggggactcctatggaatcaaaggtgtcctttgtttaaagctggagagttcagggagcatcagctaatgcccttaattatacagatgaataaagttagctggcctcccgaagatcttttttttttttttttttttttttttttcttttttaattattattattattatactttaagttttagggtacatgtgcacattgtgcaggttagttacatatgtatacatgtgccatgctggtgcgctgcacccactaacgtgtcatctagcattaggtatatctcccaatgctatccctccccactcccccgaccccaccacagtccccagagtgtgatattccccttcctgtgtccatgtgatctcattgttcaattcccacctatgagtgagaatatgcggtgtttggttttttgttcttgcgatagtttactgagaatgatggtttccaatttcatccatgtccctacaaaggacatgaactcatcattttttatggctgcatagtattccatggtgtatatgtgccacattttcttaatccagtctatcattgttggacatttgggttggttccaagtctttgctatagtgaataatgccgcaataaacatacgtgtgcatgtgtctttatagcagcatgatttatagtcatttgggtatatacccagtaatgggatggctgggtcaaatggtatttctagttctagatccctgaggaatcgccacactgacttccacaatggttgaactagtttacagtcccaccaacagtgtaaaagtgttcctatttctccacatcctctccagcacctgttgtttcctgactttttaatgattgccattctaactggtgtgagatgatatctcatagtggttttgatttgcatttctctgatggccagtgatgatgagcattttttcatgtgttttttggctgcataaatgtcttcttttgagaagtgtctgttcatgtccttcgcccactttttgatggggttgtttgtttttttcttgtaaatttgtttgagttcattgtagattctggatattagccctttgtcagatgagtaggttgcgaaaattttctcccatgttgtaggttgcctgttcactctgatggtagtttcttttgctgtgcagaagctctttagtttaattagatcccatttgtcaattttggcttttgttgccattgcttttggtgttttggacatgaagtccttgcccacgcctatgtccgaaggtaatgcctannnnnnnnnnnnnnnnnnnnnnnnnnnnnnnnnnnnnnnnnnnnnnnnnnnnnnnnnnnnnnnnnnnnnnnnnnnnnnnnnnnnnnnnnnnnnnnnnnnnnnnnnnnnnnnnnnnnnnnnnnnnnnnnnnnnnnnnnnnnnnnnnnnnnnnnnnnnnnnnnnnnnnnnnnnnnnnnnnnnnnnnnnnnnnnnnnnnnnnnnnnnnnnnnnnnnnnnnnnnnnnnnnnnnnnnnnnnnnnnnnnnnnnnnnnnnnnnnnnnnnnnnnnnnnnnnnnnnnnnnnnnnnnnnnnnnnnnnnnnnnnnnnnnnnnnnnnnnnnnnnnnnnnnnnnnnnnnnnnnnnnnnnnnnnnnnnnnnnnnnnnnnnnnnnnnnnnnnnnnnnnnnnnnnnnnnnnnnnnnnnnnnnnnnnnnnnnnnnnnnnnnnnnnnnnnnnnnnnnnnnnnnnnnnnnnnnnnnnnnnnnnnnnnnnnnnnnnnnnnnnnnnnnnnnnnnnnnnnnnnnnnnnnnnnnnnnnnnnnnnnnnnnnnnnnnnnnnnnnnnnnnnnnnnnnnnnnnnnnnnnnnnnnnnnnnnnnnnnnnnnnnnnnnnnnnnnnnnnnnnnnnnnnnnnnnnnnnnnnnnnnnnnnnnnnnnnnnnnnnnnnnnnnnnnnnnnnnnnnnnnnnnnnnnnnnnnnnnnnnnnnnnnnnnnnnnnnnnnnnnnnnnnnnnnnnnnnnnnnnnnnnnnnnnnnnnnnnnnnnnnnnnnnnnnnnnnnnnnnnnnnnnnnnnnnnnnnnnnnnnnnnnnnnnnnnnnnnnnnnnnnnnnnnnnnnnnnnnnnnnnnnnnnnnnnnnnnnnnnnnnnnnnnnnnnnnnnnnnnnnnnnnnnnnnnnnnnnnnnnnnnnnnnnnnnnnnnnnnnnnnnnnnnnnnnnnnnnnnnnnnnnnnnnnnnnnnnnnnnnnnnnnnnnnnnnnnnnnnnnnnnnnnnnnnnnnnnnnnnnnnnnnnnnnnnnnnnnnnnnnnnnnnnnnnnnnnnnnnnnnnnnnnnnnnnnnnnnnnnnnnnnnnnnnnnnnnnnnnnnnnnnnnnnnnnnnnnnnnnnnnnnnnnnnnnnnnnnnnnnnnnnnnnnnnnnnnnnnnnnnnnnnnnnnnnnnnnnnnnnnnnnnnnnnnnnnnnnnnnnnnnnnnnnnnnnnnnnnnnnnnnnnnnnnnnnnnnnnnnnnnnnnnnnnnnnnnnnnnnnnnnnnnnnnnnnnnnnnnnnnnnnnnnnnnnnnnnnnnnnnnnnnnnnnnnnnnnnnnnnnnnnnnnnnnnnnnnnnnnnnnnnnnnnnnnnnnnnnnnnnnnnnnnnnnnnnnnnnnnnnnnnnnnnnnnnnnnnnnnnnnnnnnnnnnnnnnnnnnnnnnnnnnnnnnnnnnnnnnnnnnnnnnnnnnnnnnnnnnnnnnnnnnnnnnnnnnnnnnnnnnnnnnnnnnnnnnnnnnnnnnnnnnnnnnnnnnnnnnnnnnnnnnnnnnnnnnnnnnnnnnnnnnnnnnnnnnnnnnnnnnnnnnnnnnnnnnnnnnnnnnnnnnnnnnnnnnnnnnnnnnnnnnnnnnnnnnnnnnnnnnnnnnnnnnnnnnnnnnnnnnnnnnnnnnnnnnnnnnnnnnnnnnnnnnnnnnnnnnnnnnnnnnnnnnnnnnnnnnnnnnnnnnnnnnnnnnnnnnnnnnnnnnnnnnnnnnnnnnnnnnnnnnnnnnnnnnnnnnnnnnnnnnnnnnnnnnnnnnnnnnnnnnnnnnnnnnnnnnnnnnnnnnnnnnnnnnnnnnnnnnnnnnnnnnnnnnnnnnnnnnnnnnnnnnnnnnnnnnnnnnnnnnnnnnnnnnnnnnnnnnnnnnnnnnnnnnnnnnnnnnnnnnnnnnnnnnnnnnnnnnnnnnnnnnnnnnnnnnnnnnnnnnnnnnnnnnnnnnnnnnnnnnnnnnnnnnnnnnnnnnnnnnnnnnnnnnnnnnnnnnnnnnnnnnnnnnnnnnnnnnnnnnnnnnnnnnnnnnnnnnnnnnnnnnnnnnnnnnnnnnnnnnnnnnnnnnnnnnnnnnnnnnnnnnnnnnnnnnnnnnnnnnnnnnnnnnnnnnnnnnnnnnnnnnnnnnnnnnnnnnnnnnnnnnnnnnnnnnnnnnnnnnnnnnnnnnnnnnnnnnnnnnnnnnnnnnnnnnnnnnnnnnnnnnnnnnnnnnnnnnnnnnnnnnnnnnnnnnnnnnnnnnnnnnnnnnnnnnnnnnnnnnnnnnnnnnnnnnnnnnnnnnnnnnnnnnnnnnnnnnnnnnnnnnnnnnnnnnnnnnnnnnnnnnnnnnnnnnnnnnnnnnnnnnnnnnnnnnnnnnnnnnnnnnnnnnnnnnnnnnnnnnnnnnnnnnnnnnnnnnnnnnnnnnnnnnnnnnnnnnnnnnnnnnnnnnnnnnnnnnnnnnnnnnnnnnnnnnnnnnnnnnnnnnnnnnnnnnnnnnnnnnnnnnnnnnnnnnnnnnnnnnnnnnnnnnnnnnnnnnnnnnnnnnnnnnnnnnnnnnnnnnnnnnnnnnnnnnnnnnnnnnnnnnnnnnnnnnnnnnnnnnnnnnnnnnnnnnnnnnnnnnnnnnnnnnnnnnnnnnnnnnnnnnnnnnnnnnnnnnnnnnnnnnnnnnnnnnnnnnnnnnnnnnnnnnnnnnnnnnnnnnnnnnnnnnnnnnnnnnnnnnnnnnnnnnnnnnnnnnnnnnnnnnnnnnnnnnnnnnnnnnnnnnnnnnnnnnnnnnnnnnnnnnnnnnnnnnnnnnnnnnnnnnnnnnnnnnnnnnnnnnnnnnnnnnnnnnnnnnnnnnnnnnnnnnnnnnnnnnnnnnnnnnnnnnnnnnnnnnnnnnnnnnnnnnnnnnnnnnnnnnnnnnnnnnnnnnnnnnnnnnnnnnnnnnnnnnnnnnnnnnnnnnnnnnnnnnnnnnnnnnnnnnnnnnnnnnnnnnnnnnnnnnnnnnnnnnnnnnnnnnnnnnnnnnnnnnnnnnnnnnnnnnnnnnnnnnnnnnnnnnnnnnnnnnnnnnnnnnnnnnnnnnnnnnnnnnnnnnnnnnnnnnnnnnnnnnnnnnnnnnnnnnnnnnnnnnnnnnnnnnnnnnnnnnnnnnnnnnnnnnnnnnnnnnnnnnnnnnnnnnnnnnnnnnnnnnnnnnnnnnnnnnnnnnnnnnnnnnnnnnnnnnnnnnnnnnnnnnnnnnnnnnnnnnnnnnnnnnnnnnnnnnnnnnnnnnnnnnnnnnnnnnnnnnnnnnnnnnnnnnnnnnnnnnnnnnnnnnnnnnnnnnnnnnnnnnnnnnnnnnnnnnnnnnnnnnnnnnnnnnnnnnnnnnnnnnnnnnnnnnnnnnnnnnnnnnnnnnnnnnnnnnnnnnnnnnnnnnnnnnnnnnnnnnnnnnnnnnnnnnnnnnnnnnnnnnnnnnnnnnnnnnnnnnnnnnnnnnnnnnnnnnnnnnnnnnnnnnnnnnnnnnnnnnnnnnnnnnnnnnnnnnnnnnnnnnnnnnnnnnnnnnnnnnnnnnnnnnnnnnnnnnnnnnnnnnnnnnnnnnnnnnnnnnnnnnnnnnnnnnnnnnnnnnnnnnnnnnnnnnnnnnnnnnnnnnnnnnnnnnnnnnnnnnnnnnnnnnnnnnnnnnnnnnnnnnnnnnnnnnnnnnnnnnnnnnnnnnnnnnnnnnnnnnnnnnnnnnnnnnnnnnnnnnnnnnnnnnnnnnnnnnnnnnnnnnnnnnnnnnnnnnnnnnnnnnnnnnnnnnnnnnnnnnnnnnnnnnnnnnnnnnnnnnnnnnnnnnnnnnnnnnnnnnnnnnnnnnnnnnnnnnnnnnnnnnnnnnnnnnnnnnnnnnnnnnnnnnnnnnnnnnnnnnnnnnnnnnnnnnnnnnnnnnnnnnnnnnnnnnnnnnnnnnnnnnnnnnnnnnnnnnnnnnnnnnnnnnnnnnnnnnnnnnnnnnnnnnnnnnnnnnnnnnnnnnnnnnnnnnnnnnnnnnnnnnnnnnnnnnnnnnnnnnnnnnnnnnnnnnnnnnnnnnnnnnnnnnnnnnnnnnnnnnnnnnnnnnnnnnnnnnnnnnnnnnnnnnnnnnnnnnnnnnnnnnnnnnnnnnnnnnnnnnnnnnnnnnnnnnnnnnnnnnnnnnnnnnnnnnnnnnnnnnnnnnnnnnnnnnnnnnnnnnnnnnnnnnnnnnnnnnnnnnnnnnnnnnnnnnnnnnnnnnnnnnnnnnnnnnnnnnnnnnnnnnnnnnnnnnnnnnnnnnnnnnnnnnnnnnnnnnnnnnnnnnnnnnnnnnnnnnnnnnnnnnnnnnnnnnnnnnnnnnnnnnnnnnnnnnnnnnnnnngagtgacccgattttccaggtgcgtccgtcacccctttctttgactcggaaagggaactccctgaccccttgcgcttcccaggtgaggcaatgcctcgccctgcttcggctcgcgcacggtgcgcgcacacactggcctgcgcccactgtctggcactccctagtgagatgaacccggtacctcagatggaaatggagaaatcaccggtcttctgcgtcgctcacgctgggagctgtagactggagctgttcctattcggccatcttggctcctccaatccccgaagatcttcagatacagggaggccagcactaaactgtcagactgtgaatgttcttaccactgcaccatcctacccttctgatagtgactcataaatcaaaacctataacatcatacacagcatgatcgagacagtgttttctccctagtaatcttgcctgtagtgctggtgtggtgtttttgttttgttttgttttgtttaatgtgctgcctttctagagaatttaccaatagcccatttcatcatacctcatctcaatgccagcagtgtgctcccatgaattgaatcacccctgggcgggtgtcataggacggaaaatccttttagaaatgggagcaagctccctgtgatgcaaagaatattagcctggaagtcagaagacgtaaattttggtgtcagcttggctgccattatctggattgtgtagtttttccatccgtgcaatgagtgagactagcagtttcttcttggtcttggattatgtacttgtgaggtaccagagggaagactagtttgtggtgaaggcagtggtgcaggtctggtagcctgctgagacataaggaaacaggtcatgtaattactgaggggcagcttggttttagtcttaattttctgcctggctgctgtgtgagttgattttctgacagagggatatccctcttacaccttagtgtctgtctctaccagtggatacccaaaattttttttcttctttaaaaatattttcctcttatggcctcatttaatgtcagttaaatcaagtaaatcttcatttctagctactgtttactgtttaatagatctggtctattaaaacacatttgtaattaaaatctcattatgtttcactaattccagaatccttattcttatagaaaatacaatcttaaggcagattttttcttctagtgtttagaaataggtaactatgatttttataaagtggcatctgtttggggaaagatatctactcttagttcctgtctaccagagctcagctttttgttaaagccatcatttatggaggactctctaggacccaggcactaggactttccatgtattgatttactttatttttaacccaccctgtgagattatgtattattactgttcccacattacagatgaggaagcaactgaagaacgggaacattgactaatttgcccaaggtttttcagctaatagagctgaggcttgagctcagaagcattccttccagagcccacctcctaaccacagtatatactcagctgcctgataagcagttatgccacactccattgttgaagggtggtgactaaactgagctgctcaccacacaactccagagggctcctttgatagcatggcccatgtgaatggggcctccggatttgaatactccagagttaaacaagcagtagctgtttctaagcccatgtcattttttggtatctactgaccattccttgtttctgtatgcatgtgcaggcatgcatgtctacataggcacacgcttgagtcatcacacacggacagtcttgcacctgcatatactcttgcacagttctgttgtacataccttatggctatttgcagaaaattgcccagttccaatctaattttttcttaccaattatgtgttaaagtagaattgctgactttcataagcattttgagaactttcaatgttttatgaaacttttactgtattccttttgaaagttaataccaagtagtttagttcagagggagacactctggatgggccagtaacctaaatcctgcggccttgcattggcaagtgtggactgtgaataaaggtgtcccctctgcagggtggtacttgaatcccaccacaagggtttttcagggcaaggatagtactctccggccattctgtttccctgtacctgcagctggtactgagagcagtgacaagagggtagcatccatctgtgcaatagttttgtgtctgtaattttggttcaatttatttttctccttaggcaaccagccacagcaaggagtgactccgtatgggcatccttcacacttctgaatctgcaagaggagaagacatgacgttttatgtttgcactgaaaaacagaaaatcaaatttaatgcattagtcatcttaaaaatgtccctttttttcatttctttgacattttactatattttatgctacatctcacaaaaaaaaaaaaggtgtttaaacaaaaagccaaggagaagttgtggtttgattttgttgaattcacctttaaagtaggtttacaaatgtgaatcatgcaggcaggcctactcccggaagagtgtgctagcagaccttttgaaattggtgctttttttgaatctcacatttctagaaagaatggattatgatggatctaaggtatttatgtatttcattcattaatgatgacgttgttgttttttttttaattttattttccaaactgtgctggaccaaactactgatttgaaaggcatgtcagatcttgacagaaacatggcctgtttattctgcattcacctgtgatggtgaaacggacatttatttgcatcgctctaatttgaaatgtttgtaatctcataagcactttataaactttgttcttatttatgtaggactcttctttgcttttgttgtggtcaaaaggtgctgaaacagattgttgcttagtacttaaacttcttaaaccaagaacctaaaccaaggtttctttgagagccgccctaagatgtgcggaaacctgttagaagtagctgtactcaaatttgttttgaggcaagatcattgatgagagtcattgtgaaggtacaacatgtaaatcctaaaggcctgaaagaactgcagtggaatcgtccaactatttattgccagttttggttctcctgaaccttatgccaccttaaggggaaaaaaaaatccagtagctggcttgagattccagtgctcacacttgacatggtttccagagaatctggccccaaagtccagaaggctctggttttcataaaaggtgtatttgctgtttattttgtatggtaagtatttgctcttttgaatttaattattactgtcagtgtcagtcttggttgtgtattgcatatactgtatttataaattggtgcaaaaagcacaagtaaattatacatcaaatttattataaagaaatagtaactattttaactttgttcaagtatgtggtaatttgctcctattagagtaaaaaagaaaccagtaaattatcagtttgtgtaacttaagagtattctatataatatttttttagatttagatgcataaaattttgaatgtgaaaattgcagggcattttaaaacatatgtgggggatattttcccatgttctctgttatttcattttcttttgccatatgattttacatataatatagtcaagcatactgtgaatagacttgtctataatgagcagaccatgtaaatctactttttttaaaatgtagctagtacaactttagtagacattttcttttgcaaatcattatctataaataatttatatcttcctgggtgagttactcattgcaaagtttgactcatgcaaatgacctcaaatacatgtcagcttactttgctgtggcaacatccatgtgaactgctttgtacactgtgaaaatatttcactccagcctgcccattttgtgtttactctgggctggaaaagactttgccaaaacattaaaaactattcttttcactaaattaatagtctatctgctttcagaagatgtatctatctgtacacatttttgctggttttgtatatcagattttttcctctcaagaaacatacttagataagctaatgaagttgttttcttcaaagtaatatatctatataatgactgcattggcaaatcaaccgaaatgtgaatgttgtgcctagtgagtgagtcatgttccatcattatttctttccaaatttctttgccagttcagtttgaaccatatattttgtagctcagcattgcaaacaacagtaatactgttttaagaatgagtgttataattgcatagcatttgtatgcactttatactttgcagaggtgagttaaattattaatcattttgcacatgaaagctgtggggcatatcttttttctttttttaggtgaggaagttatgctacgactctaattaattccacgattctattgaaagttgaggaatgctgttttacccctgcgcattataaagaaaataactagaattactttagtcttcagattttctccctgttaattctgtatcttgagaggtttctttttttttttttttttttgttttcttgcaaatgcattcttttgcattaagatggtcacaaggtaaagccctgtggcagaacctggtactttaccttaccagaggaaattaccttagaataagatggagcgagaccccagctccccttaaagacaagaccttgaaatcaaatggagtcagctatacctatcaatcaatcacagttcttggatataagaagcccatagactctcttgtttacactgtaggctttttcttaatagggttgcatttgtcagtcattgcatttacccttcttggcctggaagtagaggagatcaatgcgtagctttgaccacttccagccacagggtactaacatcagacataagttgcaaccaggtcacattttaggctgagatggggctaactgaaagtcagtgtgatgaaaacccaagggcgctattccacatgtctcaaatgattggcaggggctaacttattagtaattctcggttttgtgcactgagatatctaagacctatggcatttttttcccatttataaagctcctataattcttaagtaagtaagtactaggtgaatgtttgaatagatgctggagaaattacactggaaaaccccacccctagatttagataagatcaatcatttaatattccccaaattaattcaggttgaattaagcatgtaatataaattcagtgaattacaaaaacacattttgtgtaggattgatcagattttaaatacagtgaaacttcattatatataatagacctagaccctcccaagcattttcccatcccataaagaattaatgaaatgaaatgcttatagagcaacgattcctgctcagaaaaatttccttataaacagctccaaaccaggggtgcctgagctagattttaaagttataaagaagtttcattgtatttttaaaacctttttaatgggtgtatttggacaaaaataacccccttttcacattttatgatgtgcaggtattacattgctttttacatgtggaaaagtgagcctgcatttatttttaaatgcagttattaaaacatttttgtattccccatcaatgaaaattttcagtgtgaacaaatggtgaatcataagacagttcagtgcttattttctgtaggttttagcaaaaaaatttataaaccacaaaatatttatacatcaggatggtaaatttacatcataaagattgcagatttaatattttccattgtctctgttctgagtgccatgcttgtaacattgataggaggtggacactaggcaactggtattagaagttcatttttttactgaaaaattcaggtacattagccatttgttattttatagtgaaccgtttcaatgtttgtttattgttatttgttggcaaaataaaagtgccttaagttaaaagtttgttttgagatccattaaataaatcagtatcatcagttcataatgcatttatttacaagtccttttattttgcatgttcattgtaaatttaatactgtaaatgtattcaaattcatttacatgcctatggctgcctttgattaaacttcttccaaaaaataaattctgcccagatgttgttgactttattatttcatgtcagattacttgaatatacgttgctgcataatcactaccaagtgggttctttgctgtgcatttgtatatcccagaatcggaggtttggggattctgaatgactagggtaccttgtaagtgaagctgctcacttccatgtgtcctctctttacttgccgttgagagaagggagtggtcaggcatctcccacgtgatttctggcttgggaactcccaaggccacacagtggagctgaaaggctgcccctgtcctggtgacaatactcctgggtggacgatttgtaattcggggagggtaggctacaatcattactggaacagtaatcagtgtatgaccaacactattttgagccttacagatatagtttcctctgtcataagctgttgcttctttaatgactaaggtgccattgtcatgcaatatgtatttcccattaatttgaggcctgtctactacataaccacttggcatagtccatttgatatttggcttagggattccatcagacacacaatgcagtgatagagattctccactgatgccttttactgtccctggtgcataggtaagaataactggcttctggccaatttctaatatgactaatttctcaatatagccaactttattcctagctgcacagcgatattttcctgcatcctcccgagttgttttagaaatgataaaagaaccattgcttgctatcagatactgataactttgtggtccattggaaaatcgtgtgccatttggtaaaatccagattatttcaggtggtgggttaccatcaacagagcaattcaatgctgtggactttcccagctgggcaactattttttcattaaatggatttctaaatgtcggtcttctcagcatttccagtacttctaactgtactaccaacacgctctctccaccttcatttcgggccacacagataaagtcggctgaatctgaaagcctcacattcctaatttccaaggttccatttttatggactgtgattctgcttccatagtatggggctgtgaggaaaatattgtctggcatgatccacatgacttcaggagatggtgtcccttcagctctgcagtcaaagtgttttttggaatgtctcacagctgtggctttaataacagttctatttgtatacagaccattgattaatggaggtttagagaccacatccagtttgtacattttggtgtcatccccactgggatttcgggctacacatacgtactctccagaatcgagcagtttcactttgttgatggtcaaagacccattggcatgaaatgtgtacctatcaatggagaaggaaatcatgtcattggaaggcagcaaccaaaatatttttggtttgggatccccagtgacctcacagtcaaggacagctgtgtctccagctttgattctcttgttggttttgttactctgccttatccggggagcagctgttataactgttaagtggaccttcatttcatctttccctagggtgttctgggcatagcaagtataatctccttcctccgctaccccaactttgttgaagtataaagttccattgttgaaaagggtatatctcctagtcctgtggccactgtcatcggcttgcattgcattgttgatcatggttccatcaggcaaactccaagatatctctggcactggggagccggaagctttgcaatctacttggaaatctttcccatggagcacttgctttctaaaatactgcttgtggtcaattttggcaggtttcagtcttaggctaacatgcatcagtatcagatcatcccccattttgtttcttgccacacacaagtagacaccactgtctttttctgttactgatccaataaacagggatccattagggtagacgtggatccagctgcccactctaaggagaaaagagattcatttgagtgtgcagctgttagcaatgagggaaactgttttactcaggattgcctccctctgccccagctttattgaagcatgaccaatgaaaattgtgtatctttgaggtgtagaacatgacattttgagagagatatatatacattttgaggtgtgtgtgtatatatatacacatatttgagatatatatatatatacattttgagatatatatatacacatacattttgaggtatatatatatatagagagagagagaaatgaccacgattaactagcatatccatcacctcatagttacctgtttttgtatgtgtgattagctttaaattgttgcaataaaaaaataaaattactaccagcttattgtcttctaagccatttgctgaaagatgaaattatctaattgaacaggtataatttagtgcaagtaagtatttctcagatggaattcaaatgaatctccgttacatagtaattttttaaaaaaaatcttaatgaagaggcacatgctagaaatatgggagttctagacaccatgacttccttgaccatttcacataccaagtaaactaattggatccacaaacatggtgattttgtaatatatataggtaaactcagttgctcagaaaagatgccagatgatactttctaaacagttattagtaacaaaacaattactgaatcatttggttagaaaattctactttggctgggcacagtggctcacacctgtaatcccagcattttgggaggccaatgtgggcagatcacttgagggcaggagtttgagactagcctggccaacatggcaaaaccccatctctactaaaaatacgaaaaattagctgagcatgatggcacatgcctgtgatcccagctactcgggaggctaaggcttgagaatcgcttgaacccaggaggctggggttgcagtgagccgagatcacaccactacactctagtctgggtgacaaaaatgaaactgttttagaaaaaaataaattttactttgttagaataccaacgcaaggttccttagaaggttgttgcagcatctgccctctatgggcagctgtacagtgactagtttttgcactagattgagctgtgtggaataccatttttctccagatgtacagtggctgcacagcctatcattaccaaatttaaccaccagatggcagatctttcctggtaaaactaaatctacttttttagaccagtggagactcaactggtgctaaaagtgctatcagggatacctatatgagaaaacgtctttcttatttttgggcaacatgggctaagcaggtagataaaacgagaggaaagtaaaaactgttttcatagcataagtgctaaccaagtcaaacagcctcaagtcatttctctctctcctattttctatttactttatatttttttgagacagggtgtcactctggagcccaggctagagtgcagtggtgagatcacggctcactgcagtctcaacctcccaggttcaagcaatccaccaacctcaacctctgagtagctgggactacagacacacaccactatgccctcctaatttttttattttttgtagagacagggtctcactgtgttgccaaggctggtctccaacttctgggttccagcgatcctcccgccttggtctcccaaagtgctggaatgacaggcgtgaaccaccacacccagtcatcaagtcactgttattctccagcaaaggtaagtatggaaagtattatagtaaaatattagagaaattttttttttccccaagtatggaaggaagttctctggcatataaaccaaagtaaaatcaatacaaatacacctaaaggaagagaaactgccaggtgctttgcactggttgtttaatcttgaagtaattccctcactatacagctgaaaaattggtatttagagagatttagcaacttgccttaggtcacagggctggttctcaagccttacgctttccaccatgctatactggcattctttcctaatgctttctaaaagtattggttcttaaacttggctaaacattaaaacacttgtggagtttaaaataataatgataggtctgagtctcacctccagaatttgacttaatatgtgtgcagcatggcttgggcatcaggattcttagaattttccggattaaaggtttccatgtgcagcaaagaaccactgttctaactgggttctcaatgaagatccctcatcagctgcattagaattacatgggtcgagtttaagatgcatattccccggctttggtttcctgaaattctgcttcaataggtctcgccaaggatgtagaaacccactctttaaaaaacttcccagctaacataaataattaagtttgaacacaagtgtcaaattttagcaacaaaatcacctggagggcttttaagaacagattgcttattaaaacaaaatcagagctcctgattcaacaaattcccagacaatgctaatgctactggtagggggtcttcccttggagaaaaactggcttagagtgatatcccctgcacccaagatctgatgcaactggagattgtgacatataacagacagaactattgatgtttctttttataaactaatatttttgagagagataatttacttttgaaaatagaaggtttcccagagtggaagacagaattcttaataaagattaatgcagaggcatcttcagcctctccaaagcacaaaactcacatttcataactcagcatttaaaaattctaaatctaaacaaatttcaatttaatttaggtgatttttgatgacatttgaaaaacttgagaattaacatttacttttgaactaaagatcacaagttaaatttattagctgtattcagtatcaactcgtgtcattagaaaaaaatcttcaactcctaagcatgagtacaaattcacatttactatgtgtaatttttttgcatggatgttttctattaatgaataaacagatatataagatggaaattctcatcctcattttttgtcctgtaatggaaaaccattgtgtaaagtcatgccacttgcaaaaaaaaacctcataagctataattattgatttttgaagatataatttatatagaaagccagctataaaatgaatattgaggccaggcacggtggctcatgcctgtaatcccagcactttgggaggccgaggcgggcagatcacgaggtcaggagatcaagaccatcctggctaacatggtgaaactccgtctctactaaaaatacaaaaaattagtcggatgtggtggcgggtgcctgtggtcccagctactcaggaggctgaggtaggagaatggcgtgaacctgggaggcggagcttgcagtgagcagagatcctgccactgcactccagcctgggcgacagtgcgagactccgtctcaaaaaatatatatattcatatgcctataacagaccagagaaagtgtgtatttgtatatatgtgtctcatcacatcagaatgcgggggccctgaatatgtttcacttggtggaggtcttaatattgtgactttcacaaagtgctttgtaattttaggaaagaaaaaattaagtactgattataatgaagtttaaaatgtcgaataggggactcagacgagtaaaataacggagtgtctctctctagaatctccactgcatcataaaaattcccttctctgttttgtttacagagagtgtgaatatatttatacaattactattttttttttttttttttttgagacaaagtctcactctgttgcctaggctggagtgcagtggtgcaatctcggttcactgcaacctctgccttccaggttcaagcaattctcctgcctcaacctcccaagcagctgggattacaggcgcccggccaccatgcccggctaatttttttttttttttttttttgtacttttagtagagatagggtttcaccatgttggccgagctggtcctgaactcctgacctcaggtgatccatctgtctcggcctcccaaagtgctaggattacaggcgtgagccaccgtgcctgtcctacagttactattttaaaactgtgccaagtatggagataaatgagattttttaattctgcctaaaatataaaaaccctaagaagttgaccctttgagttaagcaagtgaaaagaatggtttttgtattcaaatgatctcaaaagattagttttttttgagagagtttcctttatgtccaaagtctatgtgtactctaaaactgctgctagcctcactgtgtcactttttccatttcagaagttgtacagctaaatacataaagcagataattccaacccaaaggtatagacttacctatgctgctggtcgaccacagccttggatggtaacctccacattatttggggtttgggctccccagtggctgagcagttcagtagtaatttgtccccaaaattcacttcagtccttttctgggatgcagcttctatcctggggctggtcactcgctcttccattgtaagcattactactcttcgctccgaaccagtggaactggtagcaatgcattcataagtgcccctgtctgaagaggctaggtttcttatatacaaagtcccatttgaaaataagaacaacttggaattggtaaactgtaatggtttcacttcagtgccatcagagaggacccagtaaacgctgggctgaggagttccttttgcagtacagggcagttttaaactttcaccccaagtgcctacaatgacttgcctcctttgctctagaataacaggtggtgctgcaatgacttgtattttaaccagcagtgaatcctggccacctgggttgctggccacacatttgtaaaagccacggtcataaatactgagattgtggaggaccaatgttccgtcaaccgtcaccacagcctgcctacttccctgggatgattctgagacaactgtttggtttgcaagaatccaggtaactgtagggcttggcctaccttctgctctgcacttcagttccacagtgcttccggaatgaactgtgatctctttggtacgtctctccaggatcctgggaggataggaaaccacagacaaggtgacatgaaggtggtctgtgccaaacagattggatgcggaacacaagtactgtccgcggtcctgaatttccaccctctggatggacagggtaccattggggagaacctggaccctgctattctgtttcctcttagataaatcaagtcctgagaagaaaaaaagaaaattattgctacgggtcatcaaagtttatttagaaaacataaagctatcgttttttgggctactaagaatacatttaaattaaaatgaaagcccagccctatggctca

SEQ ID NO: 796 - DNA, 5526 bp, Homo sapiens
ttttctgtttttcaggatgaatcttcaagtcatgaatgtaaccagcgcacaatccttctctatggagtcggcaaagagcgtgatgaagcaaggcatcagctgaagaagattaccaaagatatcctgaaaattctaaataagaagagcaccacagagacaggggttggggacgaaggacaaaaagccaggaagaacaaacaggagacatttccaacactggagactgtgttcactaaactccagctcctttcatattttgatcaacatcaagtgacatctcagatttctaacaatgtgctagaacaaatcacaagctttgcgtcaggaacatcctatcatctccctttggctcaccacattcagctcatctttgatctcatggagccagcactgaacatcaacggactaattgacttcgcaatacagttactaaatgaactgagtgttgtggaagctgaactgctcctaaaatcctccagcctggcaggaagttatacaacaggactgtgtgtctgcatcgtggctgttctcaggcgctatcacagttgtctaatcttgaatcctgatcagacagcccaggtgtttgaagggttgtgtggtgtggtcaagcatgtcgtaaacccctcagaatgttcttcccctgaaagatgcattttagcctacctctatgatctctatgtgtcatgtagccacctcagaagtaaatttggagacctcttcagtagtgcctgttcaaaagtaaagcaaaccatatataataacgtgatgcctgcaaattcgaacttgcgatgggatccagacttcatgatggattttattgagaatccctcagcccgcagcatcaactactcaatgctgggcaagatcctcagtgacaatgcggccaatcgctacagctttgtctgcaatacactcatgaatgtatgtatgggccatcaggatgctggcaggattaacgacatagccaatttctcctctgagcttacggcttgctgcactgttcttagttcagaatggctgggggttctgaaggctctttgttgttcttcaaatcacgtgtgggggtttaatgatgtactttgcactgtagatgtgagtgacctttcattccatgattcattagctactttcattgctattctgatagcacgacagtgtttttccctggaggacgtcgtgcagcatgtcgcacttccctctcttctagcagcagcttgtggggatgcggacgccgagcctggggcgagaatgacatgccgactcttgcttcatctcttccgagctccccaggcctgcttcttacctcaagcaacgggcaaacctttccctggaataagatcatcttgtgatagacacctcttagccgctgctcacaacagcattgaagtgggagccgtgtttgctgtcttaaaagcaattatgatgcttggagatgccaaaattggcaataacagtgtcagctctttaaagaatgatgacttcaccatgagaggtttgcgatgtgatgggaatgctgatgatatctggactgcctcacaaaatccaaaatcctgtgggaaaagcatttccatagaaactgccaatttaagagaatacgctagatatgtactgaggactatctgtcaacaggaatgggtaggagagcattgcttaaaagaacctgaaagattatgtacagacaaagaacttatattggaccctgtgctttcaaatatgcaagcacagaaattactgcagcttatctgttatcctcatggcattaaagaatgtaccgagggggacaatctgcaaagacagcacattaagcgtattcttcagaatcttgagcagtggacactgaggcaatcctggttagaactccagctaatgatcaaacagtgcttgaaggaccctggctctggttctgtggccgaaatgaacaacttactggacaatattgcaaaggcaacaatagaggtattccagcagtctgcagacctaaataattcttctaattctggcatgagcctcttcaacccaaacagtattggaagtgctgatacaagtagcacgagacagaatggaataaagacattcctaagttcctccgaacgcaggggtgtatggttggtggcccccctcatcgccaggttgccaacttctgtgcaaggaagagtgctgaaagccgctggggaagagctggagaagggacagcacttgggttcttcttccaaaaaggaaagggacagacagaaacagaaaagtatgtctcttttgagtcaacaacccttcctctcactggtacttacctgccttaagggacaagatgaacaaagggaaggcctcctaacatctctccagaatcaagttaaccagattttaagtaactggagagaagaacgataccaagatgacataaaagcgcggcagatgatgcacgaagcattgcaactccgcctaaatttggtaggaggaatgtttgacacggtgcagaggagcacccagtggactacagactgggccctgctactccttcagatcattacttcaggaactgttgacatgcacactaacaatgaattattcacaacagttcttgacatgctgggtgttttaatcaatggaacgttagcctctgacctatcaaatgcatcccctgggggatctgaagagaacaagcgtgcatacatgaatttagtaaagaaactgaaaaaagagctaggagacaagcgatcagaaagtattgacaaagttcgacagttactacctttgccgaaacagacatgtgatgtcatcacttgtgaacctatgggttccttgattgacacaaaaggaaacaaaattgctggatttgactctatagataaaaaacagggtctccaggtctctacgaagcagaaggtgtccccgtgggacttgtttgagggtcagaagaacccagctcctttgtcctgggcctggtttgggacagtccgagtggaccgaagagtgatcaagtacgaggagcagcatcacctcctgctgtatcacacacaccccatgcccaagccccgcagttactacctccagccactgcccctgcctcctgaggaggaagaggaagagcccacatctccagtttctcaggaaccagaaaggaagtccgctgagctgtcagatcagggaaaaaccacaacagatgaagaaaagaaaacaaaaggaaggaagcgcaagacgaaatctagctcaagagttgatgaatatccacagagcaacatataccgagtgcctcctaattactcgcctatctcctcccaaatgatgcaccatccacagtccaccttgtggggttacaacctcgtgggccagccccagcagcccggctttttccttcagaaccaatctcttactccaggtggctccagattggaccctgcaggctcctttgtcccaaccaacaccaaacaagctctgtcaaacatgctacagcggcgctcaggcgccatgatgcagccgccttctcttcatgcaatcacatcgcagcagcagttgatacagatgaagcttctgcagcagcagcagcaacagcgacttctcaggcaagcccagactcggcctttccaacagggccagccgggggaccaggctgctctctttgctgcgcaagcacggccctcccctcagctccctcagtatccagggctgcagcaagcacagaccatgccacagggctatacaatgtatgggacacagatgcctttgcagcagacatcgcagcagcaggctggcagtgtggtcctgtctcccagctataactccagagcctatccggccgcacattccaaccccgtgctaatggaaagactcagacagattcagcagcagccgagtggctatgttcagcagcaggcctcgccgtacctgcagcccctgactggctctcagagactgaaccatcaggctctacagcagagccctctggtgggcgggggaattgatgctgtgctgacttctgcacatccaaaccttccctccgtgcccctgcctcaggatcccatgagacccagacagccgcaagttcgacagcagcagagactcctccagatgcagcagccccagcagccccagccccagcagcctccccagccccagcagtcctcgcagtcccagagtcagacccttggtctccaagcaatgcagccccagcagcccttgtttcccaggcaaggcttgcagcagacccagcagcagcagcagacggccgccttggtgcggcagctccagaagcagctttccagcaaccagccacagcaaggagtgactccgtatgggcatccttcacacttctgaatctgcaagaggagaagacatgacgttttatgtttgcactgaaaaacagaaaatcaaatttaatgcattagtcatcttaaaaatgtccctttttttcatttctttgacattttactatattttatgctacatctcacaaaaaaaaaaaaggtgtttaaacaaaaagccaaggagaagttgtggtttgattttgttgaattcacctttaaagtaggtttacaaatgtgaatcatgcaggcaggcctactcccggaagagtgtgctagcagaccttttgaaattggtgctttttttgaatctcacatttctagaaagaatggattatgatggatctaaggtatttatgtatttcattcattaatgatgacgttgttgttttttttttaattttattttccaaactgtgctggaccaaactactgatttgaaaggcatgtcagatcttgacagaaacatggcctgtttattctgcattcacctgtgatggtgaaacggacatttatttgcatcgctctaatttgaaatgtttgtaatctcataagcactttataaactttgttcttatttatgtaggactcttctttgcttttgttgtggtcaaaaggtgctgaaacagattgttgcttagtacttaaacttcttaaaccaagaacctaaaccaaggtttctttgagagccgccctaagatgtgcggaaacctgttagaagtagctgtactcaaatttgttttgaggcaagatcattgatgagagtcattgtgaaggtacaacatgtaaatcctaaaggcctgaaagaactgcagtggaatcgtccaactatttattgccagttttggttctcctgaaccttatgccaccttaaggggaaaaaaaaatccagtagctggcttgagattccagtgctcacacttgacatggtttccagagaatctggccccaaagtccagaaggctctggttttcataaaaggtgtatttgctgtttattttgtatggtaagtatttgctcttttgaatttaattattactgtcagtgtcagtcttggttgtgtattgcatatactgtatttataaattggtgcaaaaagcacaagtaaattatacatcaaatttattataaagaaatagtaactattttaactttgttcaagtatgtggtaatttgctcctattagagtaaaaaagaaaccagtaaattatcagtttgtgtaacttaagag

SEQ ID NO: 797 - protein, 1425 aa, Homo sapiens
FSVFQDESSSHECNQRTILLYGVGKERDEARHQLKKITKDILKILNKKSTTETGVGDEGQKARKNKQETFPTLETVFTKLQLLSYFDQHQVTSQISNNVLEQITSFASGTSYHLPLAHHIQLIFDLMEPALNINGLIDFAIQLLNELSVVEAELLLKSSSLAGSYTTGLCVCIVAVLRRYHSCLILNPDQTAQVFEGLCGVVKHVVNPSECSSPERCILAYLYDLYVSCSHLRSKFGDLFSSACSKVKQTIYNNVMPANSNLRWDPDFMMDFIENPSARSINYSMLGKILSDNAANRYSFVCNTLMNVCMGHQDAGRINDIANFSSELTACCTVLSSEWLGVLKALCCSSNHVWGFNDVLCTVDVSDLSFHDSLATFIAILIARQCFSLEDVVQHVPSLLAAACGDADAEPGARMTCRLLLHLFRAPQACFLPQATGKPFPGIRSSCDRHLLAAAHNSIEVGAVFAVLKAIMMLGDAKIGNNSVSSLKNDDFTMRGLRCDGNADDIWTASQNPKSCGKSISIETANLREYARYVLRTICQQEWVGEHCLKEPERLCTDKELILDPVLSNMQAQKLLQLICYPHGIKECTEGDNLQRQHIKRILQNLEQWTLRQSWLELQLMIKQCLKDPGSGSVAEMNNLLDNIAKATIEVFQQSADLNNSSNSGMSLFNPNSIGSADTSSTRQNGIKTFLSSSRGVWLVAPLIARLPTSVQGRVLKAAGEELEKGQHLGSSSKKERDRQKQKSMSLLSQQPFLSLVLTCLKGQDEQREGLLTSLQNQVNQILSNWREERYQDDIKARQMMHEALQLRLNLVGGMFDTVQRSTQWTTDWALLLLQIITSGTVDMHTNNELFTTVLDMLGVLINGTLASDLSNDGGSEENKRAYMNLVKKLKKELGDKRSESIDKVRQLLPLPKQTCDVITCEPMGSLIDTKGNKIAGFDSIDKKQGLQVSTKQKVSPWDLFEGQKNPAPLSWAWFGTVRVDRRVIKYEEQHHLLLYHTHPMPKPRSYYLQPLPLPPEEEEEEPTSPVSQEPERKSAELSDQGKTTTDEEKKTKGRKRKTKSSSRVDEYPQSNIYRVPPNYSPISSQMMHHPQSTLWGYNLVGQPQQPGFFLQNQSLTPGGSRLDPAGSFVPTNTKQALSNMLQRRSGAMMQPPSLHAITSQQQLIQMKLLQQQQQQRLLRQAQWFQQGQPGDQAALFAAQARPSPQLPQYPGLQQAQTMPQGYTMYGTQMPLQQTSQQQAGSVVLSPSYNSRAYPAAHSNPVLMERLRQIQQQPSGYVQQQDYLQPLTGSQRLNHQALQQSPLVGGGIDAVLTSAHPNLPSVPLPQDPMRPRQPQVRQQQRLLQMQQPQQPQPQQPPQPQQSSQSQSQTLGLQAMQPQQPLFPRQGLQQTQQQQQTAALVRQLQKQLSSNQPQQGVTPYGHPSHF

SEQ ID NO: 798 - DNA, 49077 bp, Mus musculus
  misc_feature (1)...(49077): n = A,T,C or G
gggtaagccgctctcgcctggcccagccacacctcaggtgctgagagcccagcctccattcccatactccaaggtctagactcccaaaggctgtgggagataacaaagctttttatatatttttttaattatacatttgagatgtctgtagaagagaactttcatatgtcctgtgattggaatacgctaggaatgccgtttccctcagaagactagacaatgccttctcagtggtccagccagccagcctctcgcctgctccactataggcctctctagaattgttctccgccactgttttctcctccagacttaactcagcatcagctgcagccccaccctgacattcctccaggcctcagaaggcctctggatgggacactcctcccctatctcttttttcctcttatctctgtttgccattgagaaggctaggctgattccgggacagccttcaaattggccgttaagtttaagcagttaggcctaaatctctgtctccaagaactggacaattccaagcaagtccatgcctcagacactgccctgtcacctggcctgaggcagggacaatgggtcagcagcagttcccagattcctcagctacttccttggtgacatttttcagacctccccggcaagtttccagcctccacacccaggtaatggaatgtccgtagagatgggcccaacagattaacatgtaagtcacctaccccagaattccctaatgtgctttatattaggcctgcaagctcccttgggtgtgtctccatcttggtaatggagaccccaggatgctagacttctgcagaataaaacactctttccatttacacacttcaagttcggggtatcattcttcagagaatcagggacccttacaacataccatagatatcattcattaccctctcatttggttgtaagttaaattggtatagaggattttttttgttttttgtttttgatttttgttgttttgttgttgttgttgttatctattcccagtgtcatgaagagtgtctggttcacagcaggtacttcacaggaatctctcaaatgaatagcatgaatatttagaccctaagagaccccagctaagcatagtgacacagcttatgatccaaccactcagaaggcagaggcaggaggaacatgagtctgggaccagcctaagacagtgaaacacggacttagaaaaaagtaagggctagaatgagaagtagctcggtcagaatatttacctactgtgcccaaggctctggattctatctctaaaataacgcacactcgtctcaggactgcctggcagctccaggtccagagactccattcgccagccaggtttatgagtctgcttctcatctggtctttgtgggtgccttactgatatgcaagtctctctctctctctctctctctctctctctctctcacgcacgcacgcgcgtgcgccaacttaaatgaaaaaagtttagaagcaaatataaataagtaggtagttaacatttccttaagctgaaaatatgtgattaaagtgtatttggtttatttttagaatnnnnnnnnnnnnnnnnnnnnnnnnnnnnnnnnnnnnnnnnnnnnnnnnnnnnnnnnnnnnnnnnnnnnnnnntaactgtaatagttgtattctttattggagaacctgttcatcttgagattctccagaaaaaaaaaatccgatattttgggccaaatttgaagcaagctttattaaagagtcagtgctgatcaatcgatgggttttggtcaggaccgtccccaggaattccctcctgagaatggcctccagccacaatccgcaggggcttataagggcaaacctacaggtcgctgtgctttcccatgatgctttgttaatttcccaagaactacaattcccagcattccaggaagttaccctcggtgggcaggtgggaccttataggttaatttggggcattactaacctttattgttaaacattttgtgtggaaattaccccctacaaagggcagaaacatttatttcaactttaacccagcaccatcaatattcaataatttcctaatcccaaattgcttttgaaaatgttaataaatttaagctcttcttgaaaagaatacattgaagatgatagaattgattgttgtttttttattagtggctttaaataaccccgctcccaacacatcaataaggtgacaaggtcatattagcaaactaccagttcaaagtgagggagagaaggcctcagtggtggtggtagggggcatcgcatcccctgccttcaaggcagatgctgaagagccaggttctggggaagtaggtggtggcagagccacatgcagagaccccacaggtcttgtctcccgctttagttgtcctgcccaaggtacttatatggaacaaatcaaggaacactcagaaaaccctcacatgaccaacactctgacccatcaaggaaggagtgcacatctctgcatacttccttcacttcagagcatttggccacctcctaaggcaggtgcctcaatccttccatgtatcaaggtgtcacctgtctcagaaccttcagaccaacaacaagggtcagattgtagctcaaatacaacgtagggaaatgctatatatccttcaggaacaaatattgcacttgagtgaaagatccaacatcagcaatcagcaatgtgttggcatcagcaatcatgtgacatgtgggagaatgacaccccatcccggtgtaaagaaaaaaaaaagtgaagccttatagagaagatctgttgatttctcagacagccatggaaagaaagcagtcgtcatattatcaggtgctctgggctggtcacactgtaggactgtaggtgactttggtttcagagacagtaaactgtacctctggaaccctgacagcaatttcagcctagaaatcattcactcaggctgggcagtggtgacacacacctttgatcccagcactcaggagacagagataggcagatctctgtgagttggagagcagcccagtctacagagggagttccaggatagccagagttctgtctccaaaagcaagcaagcaacaacaaaaaagaagagaggagggggagaagaaaaagaaaaaggaagaaaagagaaaaagggtggaaggaaggaaaggagggagggagggaggaaggaaggaaggaaggaaggaaggaaggaaggaaggaaggaaagaaggaaggaaggaaggaaaataaattataggtctacagaggattttatatagagaaaccctctctcaaaaaaaaaagcaaacaaacaagcaaaaaagaaaaagaaagaaaagaaattgttagatgcagagaactcaataaagggtattgagcctgagttgagggtggtgggagagtgggggctgaggaaagtaaagatcatgacctaacactccgtgccttagcacacctgttgctttctctagcctccattaagtcttttaggaaaatttgacaggatagcgttgagactggtgggggagagggaaggaaagaagagggggaaggagggggaagaaagaaaacgagctaagtatttagtatcctttaaagcacagaaaagcatgattacataatgcagtgagagcagcaggttttgctctgcctccacaccctttttaatttcacattagatatggaaatcctccaagaggaaagcggaagcactcaatttgaaattatttagaaaatagagaacagatgtaaatagttgaaaatttaaaacgaaaaaaaaaaaaaaaaccacccacagcccatttactggaagaggtcctgacaatatgtttccatacagcttttctctcctcttagctgccttgttagaactgtgtcttctatgtcaactgtgctgaaattaggcaatatggatacattatcctgagataaataaacaaaagcataagctgtacattatttttgatctttaccttgtgttgtgtgttgtacaaaatgtagttgatttcacttgcccatcctagcgagcttgggaagaaatagattctgttgttcttggatgagctactatgtatctattcagctgggcccagtttcactgtgtccttcctagatacttatctttatgtgtctaagaaggaagagttgtgaggatctaattaacctccctcctgacaatttgctgtttgcctcacagacggggacactgctataggacacataaagaggctccagttttctcagaaaactgactttttcattatgcagtgttgctcttaatctcagataatctcctggtctgttgtactttgaagataaaactggtgctctggcttcctggggtcatttctcatctttctaaatcgataagcttattgataaaatgaaggtgaatttctcatgaacaatgagaatttttaggtcctgtattttagtctttgttactgtttgtcttttcatattgattttctcttttttgctctctctacttttaattctacacattattagattccgttttcttctttttcttactctatcaatatacatctttccaaaaatacttcttaggggttgctctaatcagattattttctaatttcacaatagacattatccactaatctcagtccactattaaataacacagagactacatgatctgacagaacccgcagtgttttctgctatagcacagtgccctgtgttgctacacatacctgctatcctggcacttgggagagtgcaacaggataattaggggtttgataccagcctgggctatctgaaatgggacacagcttgtgatagagcatttgtctgacatcatgagttaaatccagcattggaaacaaataaaaataagccaactattttgtttcccagacaggtcaggttctgccttgtagacagtttccagcaatctgtcctctcccttggagcttatcatttataaattacaatcatctttaaagtaaaagatttagtttcatctttatatccttcctaaaggatacccttcatggaagtctgagttgctgatttatatcatatttcctctctctgtagaattttatttcatccagcactgttctcctgtaatttttaagggttttgtttgtcttaggaaagccttcttttttttttttttttttttttggttttttgagacagggtttctctgtgtagccctgactgtgcttgaactcactttgtagaccaggctgacctcgaactcagaaatccgcctgcctctgcctcccgagtgctgggattaaaggcatgcaccaccacgcccggtttttctttctttttttttctttctttttttttttaattctccaatcatcagcttgaaaccccagtgaggttcataaaagcaacgctgactgacctatgggtgcttccacaggacgacttcacgcaccgaaaggtcccagctctagcctctgtacccttgtacccatttgttgatgactcttcaagtgccccccagcctggcactgcctctatgggctcttgctcctctagagcattcaccgagctcctccgctgtcccagaatagtccaagctgtgatctcaattctctaaagaagattgttggtttctcagtttgctccacgtttttcttgtcataatctaagggaagacttccaagccctttgagtgcttgaggaaaaccaaaaactacaaatcttagtgttttacgcagtttgtaactttgaccacacaaaaagatgatgaaaagctgatgtctaagagtaaatgacttttctaattttacttgcaagggaatggatggactggagatcctaatgtaaaatgatagcatccagactcagaaagacaaataacctgtttcccctgatatgcagatcctgatttaaacgtgaacagacgtaaaaggggaaccatcagggaggtaaaaggggaaccatcagggaggaggaagaggtttaagaggataggagcaggggagaacaagaaaaggtaacaagcggaaacagaaaatatcaagagccttctctcatatacagtctgtatttgagcatgtgtgcatatgatggagggagggagggaaaggagagagagaaggagagggagaggagagggagagggacagagagagagagagagagagagagagagagagagagagagagagagagactatcagggaaaagaagaccagtaaggtggcttgaaggtctgtctacatggaaattctaaagtgtctcaccagcaatatcacatgtcaccgaggaatttgtggctcatctttttgagttcttaggcttattaataaaataatttaataattgactcagaaggacacttctgaaaaaaagaacttaaagggaaaaagcctaggacccgcaagcttcaaaagtcaacagccactcagaggaggaagatggagaggaggaaatggagacatttcaaggcagccacacggtggatgatcgggggtggtggcttctgagaaatagagggggaaggtatatgtatgttctgtccaatatcctaaagaaagagacagaaagtaataaaaaggaaaagttacacctttctgaattcaggtagcagaccctcattgagactccctctatgaagacctcatcagagctgtgaggaaggcattctatctcgataaagggataattattcttcccacctctttatcatcccttaatgtaagtcaacctttccaggtatggtcagtgagcctgtagactgaccagcccaactgcattaactctcttgttttgggaagcttggaatgttaggtttcccctaggccattgaaataacatttctcttaaggagactcatcggaacaccaatacagacttctgtagcatttccccctctgaagaggtaaccctaaaatcgtttaggctatgggacaaagttgagcactaaatatataaagcatttttactgtgaaaatctagatattcaattctaaagctttgccagagggaataaatgcctggactggactttcagtcccaccccaggtatagctccagggctgggtgctggttcacaaggagttaactccctttagacattcccagccagagagccaaggactttcctggaactgcctacaaactgttctgccaattcctgtctcctggtctcatcagatggacagtaaagaggagtgggagagtgaatataattaggatacaaggatgtcaatggatgaaatgtcataactaaagtccattattttgtatgctaagtaaaaaaaaaatttttttaaacactaaaagtgactttcctagagaaatagtgctaacagacgaagctaaagttaaaatctagatcttacattatagacatttatgtttggttattagtgcaaaaggtgcaatctctttaaaagtctgtatcagagtctttcaggctagggctctctttagtatgatgtgcgaagcactagacagaaatgtccatagaaagagctctcaggcctgaaacgagctccaacatacgtttacattttagggaattctcaacagagggagtctgtttttcatatcagtttaaaacaatagtgaagggtgtggccacagggtctctttggtcataaagtgatgatatcttagattctgtttatgttctgtatctttgggaaagagtctgggtctgtgtactgttggcttaacttggaaactgtgctgactctgctccagacagctgcagtagagcaaagacagtagcaacgtgaatcatgggaatgttttgcttgcccagtacatataaaagttcctcctacagtgtcttctactgtgtgtacaatagatgatgtctaaagagtatgcaaacctatcttagtttgaaatactcagttgggcttcctctgacagctgagaggaacagatgcatagacccacagtcaaacattagtttcatagagcccaaattggagatctccactgggttcctccccttgggctccggagaccccgtggaagaggcggggaattgtaggaaccagaggaacacaagaacacggcccacagaatcaactaagcagggctcatagaggctcacggagattgaaccggcaattacagagcctgccatgggtctgcgttaggtcctctgcatatacattatggttgttgccaaaacaccttaatttaatgtggaaaaatttaaagaaattaattgcaaagtacataaagttaaacttaataagcaaatctctgcctgtttatgtgtgcacataaacaggaagtttctcgattttttcaatcactaaattaatcatttctcttaagaaaatgaccttctttctttcttcatgatactctgcctcccagtgcagttctctgatggatgtagagttgaaaagcaaggcttcctttcaagaaaccttatctcctaacgtctccacttttcttctctttcttgtgaatctcacatgaccagatagtggatggtgtcagcttaatccactccaagaggcctgcctgcctcaaactcagactaggccaggacctagcacttcctcttcttgaagttcacatctgtgtcttctgctgtgctagtatccggcctagagagacagccttgctgtctaggagaggtctgtcacacacacacacacacacacacacacacacacacacacacacacacaagagcgcgcacacagacacatatggacgcgcgcgcacacatacacacacatgcacgcacacacacacgcacacagtcacacacacacactcacacgaacacatgcacagagagagagagagagagagagagagagagagggagggagagagggagacagagagagatgaacacacacacacacaaacacacacacacacacacacacacacgagcgcacacacagacacacatatggacgtgcgcgcacacatacacacacacgcgcacgcacacagtcacacacacacacacacacacgtggttttcagctacagaagaggcaggtaaatctacatcatatgctagtggttgcttttacctctgaatctcaatcggatgtccgaagcctgcactcctgtccattgctcttgattcttacagctctttaggtggggtgggatacagctactgctctggaacgtgatgcacagcctggtttcacaggaaagcttcctggaagctattttcaaagaaattacctcccgggccaagctttattttccgcaactccagtgtatggatttgtataaagccacctcccttgtctactgaaatgtgccagcaagccacaaaggcatttagttcacattacagtagcacacattaattgtttacatttgtctaagctcatgattccagctacatgggaggctgaggcaggaggatcacagagtctacttgggctgtggagtgagcgttaagccagtctaggcaacttcggaataagctgtctcaactttaaaaagggggaatgagagttgggagtgcaaattaggagagattgcctaacaacaaaggcaaaccgggatggaatgagcatttattttgtaactgtgtgaggtagctccggctttgtctcatccacaaactgcacaattaaaggtgtggtgtttagcagaaggtgacttgctactcactgaacgagctcttctttaaaggggggggggggcacgacactctctagttaactcgctgactgacagagggcctgaggactccttagtcacctgactgagctccagccctccgctgggagggtgtcctgagcctccgcctgggagggactccggtctcccttcagattccggcaggaagtccgcacgcgtccagggaagagtcagcgcagtgagaccccaccaggtcacctgagtctaaggtgcccctgggtctgagagccgccctgcaaccttcagctcctcgggaaaactcgcagagcaagtaagtgccagcactcgtgacgtcagcccagagacaggcgaagctgcactcagattggaggaaattaaaggaaaccagaaatgaaatctttaaactagagcaggcggcattgatcgagcgccggcactatcttaaacgcaggggaggagctgcttaaaactttaaagtagtcgggagaaaaagcagatataccagtaatgaaacgaaagtagtaaattttttagaaagaatgaatgtagcttaataaaatattaagtggatacttaacacgtaaaccttagaatccttggacttaagacttttccacggaatgttgaaagcttttaccttggagaaatacgaactatttcgatagctgctgcctggttggtaatctgtctaaggtaaacgcgtgtgggcaggtcacgtgctacctgacccacgtgatatttatggtcctattgtctaactaaaacttgaaaaaattttaaatgaatgggagggatctagcacaagtttaaagcttgactgagctctgaagcgagtttaaagtctgcctagaaaagcttggcgagactgtctcaaatcaaacaaagtaaaaacggggttcgggtatagctgagcagagcgtttgccgagcatgctgtattattaaaaaatataataataataataataataataataataataataataataataataataataatggattttgtttgcttgcttgcttttttaaagacagggtcacactagtgttgtcctggatggtctggaactagctatgtaaaccaagcaggcgatgatctcaaagatcttcctgcttctgccttctgagtgccggaagttagcttgctaccaacctagactgaaaataagatttttagaggaataatttggggctaggtttgtgcgaaaaaagggttggggatacatgttcagtaaagtaatgatgcttctctttaccacagaaatgtcactgatttaacgcgagatggactcttccttgtggcagtctgggattgttggttcacagggaattagatcatgtgcttttggaaatgctctggagccgtgtgctgtaaacgaacatcgtttatctaaggcaataactgactggagttgattcagcagtcaaatgaggtcatgcgctctaattagcactactaattattcatccaattcaggctgaaacctgtggctgcccatcaataccccttagtggagccttctttcctgtaaaataatctacctcattaaatggttaggcactgtcctcttagccatatacttgctttgcttgttttaattaaaatggaaaaaaaatgatttcttagctattaaacctgtattttaagtcccaggacagctttccaaatagctctcctgcctcatatttagaagtcctgttagttatttgcttatttattaggtctaaatggaatctcctgcctcgtatttaacagccctgatattttttatctgtcctatttatttagtgaacaaagagaagtctttacacaggttcccaagtgctggggctgttggtatgtgccaaggatctttcctgataccacattcctcttttcttcactgagagagccagaacttttttgtagcaatgatatctgatagaactttttacagtgacagaaaattctaaatttgcagggatcagaatcttggctgatggacaccttcggcaactgagtacttaaaatataatttagctgaagacctgatttctttccttgtcttgacctgaataattgtattgaaaagttagttactttgtgcgacttggtgctcccagagtgcacagcagggatgtctacctgctgactttgtactcttctgtaagctgccgtttgaaccacactgctggtgaggttggattttgcaagatcatcttttatcttcatttttaaaaattgatggtatagatatttatttatgcatgcatacagcatgaacatcctgtgtgtgccctgtgccggggagtgaacccagtgtccagtcatattaagcacatgctccatcactggtctgtaccttaggaaagactcttgagccatgaacttgctacccaaggctctaccaacggacaaaaaagatcctaaatctgtaatggccatgcaacctgagtgcacctttacgcgaatgtcccaaacacagcaaaactcacttacaaaacacttacttagttctgaaagtcttctcaggcaagcttgaatttaattgacacaacagagaccagaaacatgttcatcatgccggactgctttacagggaaatgacccttctcatgtagaaaatactggatccagatcctgtgaaaagttagattttcaaactctgaagggaaaaaaatggtttatcttattataagttcgtgatttaaaaaaggattgatattttttgaaacttgtttcttgggtattctaagtttctggactaatatccacttatcagtgagtgcatattaatatctgagtagtactccattgtgtaaatgtaccacattttctgtatccattcctctgctgaggggcatctgggttctttccagcttctggttattataaataaggctactatgaacatagtggagcatgtgtcgttcttaccggttggaacatcttctggatatatgcccaggagaggtattgcgggatcctccagtagtactatgtccaattttctgaggaatcgccagacatgaatctcaagaagaatgaagaccaaagtgtggtcactttgccccttcttagaattgggaacaaaacacccatggaaggagttacagagacaaagtttggagctaagatgaaaggatggaccatccagagactgccgcacccagggacctatcccataatcagcctccaaatgctgacaccattgcatacactagcaagattttgctgaaaggaccctgatatatctgtctcttgtgagactatgccggtgcctggcaaacagaagtgtatgctcacagtcagctattggatggaacacagggcccccaatggagaagctagagaaaatacccaaggagttaaaggggtctgcaaccctataggtggaacaacaatatgaactaaccagtacccccagagctcgtgtctctagctgcatatatagcagaagatagcgtagttggccatcattgggaagagaggccccttggtcttgcaaactttatatgcctcagtacaggggaactccagggcctagaagtgggagtgggtggctgggggagtgggtgggaggatatggggggcttttgggataacatttgaaatataaatgaagaaaatacctaattaaaaaaaaaggattgatagtacaaatgaagaacagggcaaatgcaagcgcatcatctacaaatgatagatattcgcatagcaacctaactgcaaagaggagcctttgcctccttttgattcggagacttcatgtccagatctcagtgggttcacaggttctcaccttcttttttttgaatttcagaatctcctgtaaaaacacagatcgaaagtaagacgggctgctgtctgctaccctgcaaccatgagcagcaatgcaacagacctcaccaccggctacctctcctctgctgcggcaatcctcctgtttggctccaactttgtaccacttaaaaaatatgacactggcgatggtaattggttttttattgttaacctaagcttgcttttaagtgtcttggttatttgctttgtttttgttttatctttttaaaataacggcttttaaaaaattacattttattgctcataaggcctagtgactagaactcacataaatcgtctcacagtgccccttgtggcgcactgagggtgagtcaggacaggaaggacagatggtgctttgtagcaaagccacggtgggtaccactggaaaagctgcttgactgtgtctgctgtgtttataaaataggtaagttatggccagttccactatcagcattcatttgaaaaccaataacgacccacctgataagggagacaccaagctgagcatataacacaaacctgtttactagtgaacaagctcttctctaacaaatcctgaggcaaacgcagaacgctgctctcagttaaagaaagatgtgcggcaggactgtcacctaggcatgcgcacatgcatccctctccacagagctgtgcaccaggcctcctcagtttaccacatgtgcacacacaggcatacctccttgccaggcaacaatataccatgctttttcagttcaccgcatgcgatcccaagtttaccgtatttgctatacctcatgttcactgacatctgatgtcagacccctattcctacagccctgcaataatccataggcagtggtctctacacataaacctccactccttttcaaacgaaagggctaggtttaatatattgttaccacacttaaccgtttaatcggttaaaactgctgtttctattaattcctgttttgcttttatgttttttgttttttaaatgcattgctggttcagtttgtcactgtctttctccaaaccagatctggttctgttttgagttttttactgcatagttttgctcagcaccatagttctagaaatgcacatgccacaatgcagcaaacgagtgcaaggtgatgtttagtgaaggaaagcaggggtcccccttgcctgcccgatgcccttcctttggaagcaagaagggagcagagacatccagtgaccacccacaggaaggtaacatcccagttatttttaaatctccctagttccttagtcttcatactgcttagacaaaaggattacaaatcctttctcccagccttttcttttagatgttgacaggaaggaaaaaaaaaaaactagtagaaaactaaccaaaatgggcagctgacctagcttttgggtttttgatcctagacaagggtcccatgtgatgtggtaaatattatttgaggggggggcggcattaccccactttgaccatatagttcccaaataaaagatacaaaagcctttatatttataataagtcttatagcattagagctaagtagatattaactctctatgctattttgtctacttctctgtcaataaccccaagatatcacttgccatgttcctcctgggccactcctactccaccctcataaccagccctcatgaccagtgctcgggatccacctaccccactgcgaccatttccttcttcctcctccctcactcttcctatggtcccagtctgagaccccccccaagcccaggacctccagccccatctacctctcttctgtccagctatagctataggcatctctattaaccaatcagggataaggggggcaaggcttacagaacaaaagctggtatacgtgagaatctgcatgtttgctggttttggagtacagaatttagcctttggacacaggcagcaccagaccaccctctacacccatgtgtgtgtgtgtctgtctgtctgtgtctgtctgtgtgtgtttgtttctggaagctgggaaggccttgtcacatagtagaacgctctagtctgagccaccaccaacccagcaagtcttaccagttttttgtttttagtttctcacttgtagcataaagttccctttccactccaacactgcttgtttcaaatcttggaggttagcagacatttgttcccctctactcttctctgttgtgagaatgaacagaaatagacaaaagctttgcaagttgcaagcaaaaatggcagcgtagaatgacagcttctttggtacttcatttggtgtggaatatctatctttgcaatccctgagaccttgatggtacaggagtcttgaatggtcactgccatgttcatctcctgggcaatatccagtgactccttatctcacgaaaagcagaggtgtgccagcctagaaggttaagtctcaggcctgtaaaatctaaaatccatctcatcccgggaattaaactccaattgtgtgagccacgaacgccaagtgtatcacaaggtttaagtcactgctgcactgttgggaagttcttggtgccatgttttgatggttgcagtgagactggcatcagagtggaaatataggctcgctcttcccaaaattctttaacagacatttcttggtttgactacaaagtaagagagcagcgtgttaagcaggaatacactggggacttcagtgtcaagcatctaggctttacggtccagttagaaatgtacctaccagatttttgaccagatttgtttccttggtgtctgagattaggcccaccatgacataaagtagctgtaagaataaatataccacatgcccactatatggcgacatgttgtgatttgtgtctgtctctctaagaacatcttgcagatattcttaaacatgcatagactccaatctttctgccaagtaatgcccggttgtcttatttgtagggatgttccttcagtgggtgctctgtgctgccatttggttggttgccttggtggtcaacttgatactgcactgccctaaattctggccgtttgcgatgcttggcggctgcatttgggcaacaggtaatgtgcatattcatcttatacatgggtcacacagtcatattcacaaccaggagacaaggcacagtgggctcagagtcattaggtagacacgacaggcatgagctttgtattgttttctttccatacattgggaaatttcttgatttcttttcccttcaaatgttttaggttcctgctagaaaattattagagtaaaagatatttgatcctttaaacacataactcaaatgccattgcacacatttgacctttctccagcatgtttgtcagaaaatgtttattacagagctaccctttgttagcatcatttgtgagcttatccttaaaagctggcgaatagcagcgtgtaatcattttgggtaacatttagcaaagaaaagagaattaaaaatctcttcattgccaggcagcggtggcgcacgcctttaattccagcactttggaagcagaggcaggcagatttctgaattcgaggctagcctggtccactgagtgagttctaggacagccagggctacacagagaaaccgtgtcttgaaaaaaccaaacaaacagacagatagaaaaaaaaaaaaaaaaaaaaaaaccctcttaattgctttatcaatgccttaacaagtatcatagaatctacatttccaggtagccattcagaaacgtctcctctctatgaattcaacctgtaaagtcctctcttatttatttattttttaacaaagagaattaccgaaaatccttaagagagaaaattattagatgcaaataaaatttaaaacgttaaaatgctactgcttacccacttgagtctttgagggattgaatgagtgaatgaaattctttagtcagagaccaagataagccagcttccccttcccaccagagtctgcattacggcgcctcacatacgtgtgtctcacatacgtgtgtctcacatacgtgtgtctcacatacgtgtgtctcacatacgtgtgtctcacatacgtgtgtctctgcgactgtttgctgagtggaactgggagagggggaacagccttcctttgttcccttggcttctggaggcaacagtctgtccatgcagcccaaggctagcctagaactcagtcctcctgcctctgctgcctgatgtcactgcagacatctctcctttatttgtcagcctgcactttgttgtttgtttgtttgtttgtttgtttgtttttggtcaaggctagtgcataaatgtggaatacttcatgaatatcttcatcctctttgtgcagaggtcatgctaaccttatttgtatcactccaatttgaatatgtgcacttccaaagtgagcattttttttaatttttgaaatatgcatttatttacttatttattcaagatagaggtatcactgtgtagccttggatgacctggaggactatgtagaccaggctgatctttatctcacaaacaggttccactgtgctcagagtggataagtagggagccaaacttgagaaatataagcacattataggttataacaactaaccggtcgggcgcacagaggagctggtggtgtaaggacttggttgcaggtgattagaagggagactaacactttgtatcagaagaccttttccagatgggaaaataagtggagcatggtagcctctgagtctaaagcccaagcattgccacaggggacgacactagctgcaggctgcttcagcagttcagagcagaacactgagactcaagacagtctacactggagctgtgttaacagggtacatggacctctggtcaatggctcaaatcaggagagaaggtgactcacaaacgtaaagaggaaacctgggaaagggaactgcaggactgagttgttgcagagagggtaggaagtgttttacagaaagcagcagtgagctgagtatggtggaacacccgttgtcccagctactgggaacagtgagataaggcttattgagtcctaaaatgggagaccagcctgtgagacattgcaagaccttgtgtccataacgactatgctagtgacaacatgcaacaccatcagggatttggccctgggaaccctcaagagcgtaaggcaatggttgtgagaatcttagaaggaaagccagtgagtattagaggatgcattctagagttgtgttgaggcagaagttaaattcaggaaaaatggtaatttaactaagaaatgcgtttgttgtgtgggaagtcatccatttttccttcatgttgtatctacaggcaacattgctgtcgttccaattatcaaaaccatcggtttaggacttggaatcctaatctggggatcatttaacaccttaactggctgggcaagctcaaggtaacacagtccacactatctcagctacgagtcctgcaccctgcatttggtgtaaactgggatctagccatattgggagaaataacatgattcttggtctcagattatggctggtacatgtaaatgaaccatgtctattatttgtctgaagctcttcataagtgatggagatattttatgaagatatagtaaaggaaataaaaagtaaaagctgtatctgggagacaagtggggagaaaggcagctcatgtctgctttctccctctactgcctaaccaggtacctaaagtagatgctcgacaatctgtggctcgatctccctgggattttgtaagatttagtgagatgtagctatgtcaaaacacttaaggagcctggcaaggtggcacacacctttaattccagcacgtggaaggcagaaccaggtggatctctgaattccatgctagcctggtctacaaagtgatgagttctaccacagccagggctacacagagaaactccatcttgggggagggggtgctggggagggcagtaactgtcattgtctatggctgctttcacataaaatggcacagagaaggggctacagctagccacacctaaaacattctggcttttaaaggagaacttcttcaaggctagctagaagttgtgttgtccaaaaggttagccacaagccacaggtagctgttgtatggaaacttaagctaattaaaatcaaaacatttgagccttctaggtcgcagtggtattagctccatttgcagaggcttccccattccacacagggcagggatggggacatgcgtgtgaagctccatcaacagtgtgtggtgcccatggtcggtttgcttcaggctgggctcggggaaatgagaagagagaacattactcttgcctcactttcccttccactcaaaagcattataaccaccccaaagaacaaagccagtcagtctgccagcttactgtgtgtacatctttccctgtcctttctctcccagtgccctggagttttgtttgtttcgatggaatgctcactctcttacccttgggtggctctccatgaagagtgctaatggttgtgacaaagtcaaaccatgatgaaaagaagagattgtaaactaatgtcgaagagtaggaatttttagccaaaaagtcatttgaaatacctcaaagattatagaagggcttgagatagagcttagtgttcgagtattgtctagcatgtgcagggccatgagtctgattcccagcgttgggatacatgtatgtgtgtgttttcccatggttgttttttggtttggattgagtttgattgtattgggttaggctggactgggttgggttgggttgggttaggtttgggtttggtttattgttttctgttgttttgtttcgtttttggaataagacctcactatgtagccctggctggcctggaaatcaatatatgaccaggacggccccaaactcacagagatccaccagcttctgccacccaagtactgtagcccagtctggccttgaattcttcctgccttacctctggggattgcaggaatataccaccagtgcctcaactgctcttttctctactttaacataaaaattaaaggcacagtatggaaagtagtttatccaaagtcagtacatgagagaaccaagatttaaactcaaagagtccagcccctagtcctagtcctagcatgactgtaaaacattttagcagtatctgatctgatattcttctggatttccaggtttggctggtttgggatggatgcagaagaagtgtccaagccaatgctgaattacgttggagctgggctgtcagtagtaaggtctacagaggtttctagtccctaatattttggggcattctgagtgttttctaaagatttgttttatctttcatctatgtgtatgtatgttctgcctgcatgtatgtacaccatgtctgtgcctatcagagaagagtgcccaattccctgaaactcgagtgacagatggttgtggactgaaaggtggatgcttagaataaaaccctcatcaaaagcagccagtgctcttatccactgagctatctctccagtcccactttctaaagcttttaatatccttacattttctttaaacctacatttcataaagtttatgtttcctgatccttaattttcaatgacagaccttatttccagcacacaaaacaccagataaggggggtcaggaaccctagttttagttctcaaaagctctgagaaactcggaaaaagtcacaaaactgctctgaagttattttaatatctatactagatagaaaaatcacaatacattgcccatgaataagaaccaggatgtactggatcattttgcttatcaaagtatgctattcaagtcaatattctgctggtttcctctatgcaaccggaatggtcgcttattatatttagtccagtagttcttgctcatccaagaggatgtaccaaccctcagaggattcctaaaacatagaatgtagcaaaaactatgactttttccattttaactaagcactaaggccatgcttgtatagttctatggtttccataagacaaaaaagctaggaaaaatatctatgtcttaaaactctatgagttagctttgttcttactacaggtcttagagcctttagtgcagttcttttttctcttttgttttgtaagctaggaattttttttatttaccttctcactggaaggtaactctgaatgggtcctctttggcacattggttctgccagcttgcttcaccactcttgtgatttgtgctcatggtagctgaattcagcactgcaaatcaccatagtgggtttgactaaggggacttcaagtcctgggtagttcttcaaggcggctacctgggtaaagggatgccaatgcatgcctggggcctcagacaaagagacagcaccgtgctatgcgaggcggtgcacaaggtagggatgtgtatgccttgcatttaacatgtctgattgtggctgactataagtaaggggagccttgctgagtactgataccagcctctaccaccccactctcccattccttcttcttaacccagttacagctctctcacctctcatattctctcttgaataccaagttttccatgactcctcctctacttgtgtatactatatcgctaggaatgaaaatgactttgaatctctacacagtggagttttgccaataaaactcaagcaagaattgggtcaccttaaattcagtcaccttttctctctgggttccatttatatctgctgctgtcactgctgcacatactgaatagcactgctctcaaagactttagtactttttcgctcttctgggaaagaacagtatatcttccttcctccagtaacggtgtttttccccagtcacattcaggaacaatctctttgtcattgaaatgttgccttagagagtagtccctaggcaattgggaacgaatagcaaagcttattctaaaactgtaaattcttgacacatttggttagaggcagttttatgtgttctgtacagttcactcggaattctagctttcggtagttctaagacaatttcttcacattgtaaaattctaatttagcatgtctagttttaacttaatggtaataatttaatgttggtccatccagtacattaggcacctttctcctccaaatgtcttctttaaaaacacaaaaaatttccctaaaattacaaatcggttagtttctcctgctctgacacttccacccagaagaccttgcacagatctcttctccaagtcctttgttttggcatccataaagaggaggtaatgctagcaccaatcctttaagataatttgaaaagtaaacgttgtgagagctttgtgtacctagacacatggtgaaggctcagtatataagttagcttccatcagtactcactatctgttctgtagtaaacactaaatcatcaatgtaagtgaaaaggccattacaaatcagtcccattgttgaggctggagacgttgcacaataggaccacagtgtatggaggagcaaagctatctaccagaggacaacagaagtgaaagacggggaacctccatgagcccctttaaagacctgcccctaacaccgaacttctgattaagctccatctctgaaaggctgaccacctccccacagcaagtagaccagacaccatttgacatagctttttagggacacttagaacccaaatacctctactattatattcatgcatagttgccccttggggcatttgttggtgtctcaatgttaattgggtaatgaactggagggactctgcagctctgtcaagagctgggtctgcagcaggaggatgcaaggatctcttcctgtgaggcatccaggccccatctctattgctctcctgggtggaactgcaccaatctgttatttaattagtttaacttaatggctttaataggttcattttgaagggcattggctgagtgaatttagagctcatggtagtgtgaagaaacaaaatatagtttcattggttacagagtggctttgttctctctctctctctctctctctctctctctctgtgtgtgtgtgtgtgtgtgtgtgggtgtgtgtgtgtgtgtgtgtgtgtgtgtgtgtgtgtgtgtgtgtcagcatgtatgcatttgggtgcacaggtgtcatggcacatgtgtggaggtcagagaacaacctcgactactgatttccatctttttgatataggccctcattggtgctacatacatcaggccaattgacctgcaaggtcccaggcccccttctgtcccagtgtcccatccttctgcaggggtgttaggactccatactctctcattgcctgtgttccttctcacatcagttctgaggattctgacgcaggcacacactttgcccactggaccatctcctcagctcagatgttacttttcttttcataattaagacaatcatttcagttcactgtgcagtccagtctttaaagaactggtggcacaattcctagttttacattttccctgtataacatatgctactctgtttatataacaggaaccactctaggactttgaatcaacagaggatctatttgcttgcctgcctgcctgcctgcctgcctgcctgtctgctttcttgtctgcctgcctacttgcttgctttcctgcctgcctgcctgcctgcctgcctgctatcctatctgcctgatgtgccatggattatccaagcatctgttctgtttctgtccctttcaccttctctctctggagtgttgtttttttacccaaccttggcctttattctgcattgtgaggaagagcaagcctttgtttctagctttgtctttcacagagttgcagtctttttgtctaactatagaccaggctggacggccctactaaaatgccacaataactcctggtccatccatgtgagatgacaaaccaaaggcaaaattctaattagaaaaacacaaccacccttaatgttctcctttacaacgcaaaatgtgtgctgcatttcatctcctaaatccactctttctgtcattttgttttgaagacaaggtctcactatatagctcatgttgccctagaatgcaaagcccagactggcactgaactatggtcctcctctgttggtctctcaagtgctaggatctcaggtacttctgggttaggagacatcaccttcctaatttctcctccagaaagactgtcctttaatcaggaatgtgactgtcatgtggaggtggccatctcttacagctgtccaacaggatattgttaaatgtttggcggttgccattatgatatataagggatgcttttggggttgtgttcactttcatttccacgtggtgcaatgtaaagtcatccaacctaggggaagtcccttgtgcttgttctttaccctgctgaagaaaggacaccaaggagaatggggagttgaagagacagcaagcccccacacacacacgggggcgggggggagggtgtagaagtaattccattatcaggactccatttaagttctgttttcccttgaaaatttggtagctagataccccgaacaaaacacagcaatcatgtcccggtcaatctcactggaatgtatttccctacagtgcgctcacgtttttgttcatcaaaagtgaaattccgaataacccaggcagctcggacaccacaccactgatgacagagcctgtgagtatcgccatgattctgccccttcccctctcttctatgaactgagctggctgatagcttcattaaattgacctaaaaagagagaagagggatattgattcctgggcatctttaaggactgtgtgcttcaagaaaagataatttgtccctgagaggaagctcttgaccttcttacgtgatccagggatctagacgatgctaaccaggctttgaatgaaggaggatcacagtcaataacagaaatgttaaatgttcttcaagtttgtcttccagactttcctcaacttaaagtattagcctaactttaagacatggctggaagtattttaattcagtaaaacaataaacaaataaataaataaataatgttattgagagaaaatagacattaaaatgtttattgatttcatgcattccactgtagaaaatctgtgtttttcttgggtctaatttctttacagtttattaaaatacactagtgaaccatgaaatctaaatttttatcaaatagctacacattaatctgtggaaaatgttttgaaaactggaggggtggagttagaccagcggctctgaactcccagagcttgtaggtgatttgtgcttctgctaaggcatgtttgagatgggggaagccctggaagcctttgtgtggcactgaaatggtccgctgaaggtccttgcatgccggtctctctgatgacttccacaggtgatcaacagaaccgaggaccggagtgcggattcctcctgggtggatagactttctaccacgtaccaccgcattgtgtaaggcgaggcagcttctctctcctgttgtgttttgtgttttctaaaacagagggcccagagagatgtggtgagattcatctgatcgcaggaagaaaatgatcgcgaaaacttgcacttccacctcctagggggcagggttctctacactctggtgagatttcagtatagaagatgcctggaggcatactgtacctgaccagttagccagtgacaacagcgattgtgttttgtaggactttagtatcaaaagtatagtggttgcataatgaccgtgtagtgagcatcacagtctaatcaaatagtgtgctccacttggtcagcagagggctgccacccttctttcccttgtgactgttttatgatcccaggtatctgttttcaaatataatagaacattgtgtccctaaccccatgtcttcctcgtaagcacttcagagatgccttaaagcagcctatcactctttggagtacaggagtttagtggtttggttttttaacttattttttgtttgttttttatttttcccccagagagccaaactatttaaaacacactatagtacacagctttgattctcgtgttctttaaatatccttaaataaaattattaaagttgacaaggaatttgttcttaggcttaggggagtttttcaattatcttattgttttggttttggtttgcttgtttttcaacagaatcttggtatgcattccataccggttcaactgtacagccctccactctctgacattacagcgttttggcacgagcctttgaagacaggggtcttgtctaaaatagcttccctcttttaaatgcttgtttgtatgaagataaaaggactatccatcttcttcctcaaccccgccttgccacgaatgccagctcctgttctatgcatgcagggcccaaggccaaggagttgacagtgtttgaaataaaacattacttcttttcataaaggaattgtttatacctaaaatatccagattcttagtcaatgaacacttctcgacacgaccataatcagttctgtctctgcagccattctaaacagaaatgcatttgtccatagtctgtgctggttccgtgaggaccctggaacatgtgtctgaggggaacttgaacgaaatgtccatccacagttgcctcacacctccgtttatttatggtgtatgacgctcagtggcaatgctctcaggtggccttcactccctctgcatatcatgtccttccaccatgacacagcagacggctgaggctacgcctctctcctcgtgactcacagagtccaaggcagaggtctggcttctgctaaactgctaaaaatttgaagaaagccttacttgtgtttccatttgtgtgtcagaaacatttcctctggccaagatacacagtggttttcttgttgtttcttaaggggctgcagccttgcggtaatatctggaatactctacggatcgacatttgtgccaatcatttacatcaaggatcacagcagaagaaatgacagcatgtacgcaggcgctagccagtatggtgagtgaagagccttcctactgatactctattaatagaaaaaggagctgtggtcgtcagcactgctgtgtgcatttgtcttttcatttgtaagcgctgaatcaggaggcaccaggaataaaggtagcagtgggcactgaaatgttttcatgggatctgtaacacacaaatggattcaactatggtcaggattcacttccactgctgggatctcagcaaggggttctcagctttccactaagatcgagagattgtgaagagccatttatgtctaatatcatgacctctgagaacatatgtgtgatgatatgtgttctgtgcttttaaaaagttaaagtatagcacacagtattcttttttccccagtaattttaattcaaggaatgtttctacagaaagactcatatattttcatgaaaaggaaaggcaggaatgttcattgtgacattattcacagccatataaaactgaaaataggttaaatgtccgtgaatgaaggatcatttgaaacagctaagatatttgcgcatggcagggtatcatgccattattcaaagtttggcaggtgcatatgtatcaacaggctctccatgatgcatagcacacagtattcttagaccaagtaaatttccaaagtatattagaggatagtctttttcaagcacaaagtggtccatctaaaagggtcggcataatgcctccagttctaaaatcagtatctaggagcaaagtgaactttctgtgcaacgaccctgggccagctgaaagggaggtgagaggatcctctggtgggagtcttagaactgcacggaagcacggcagacttaaggaagcaaggagaaagggaagttctggtcatgtgatgtagaaaaatcaatgtgactggttacatagataagagagaaatgtgaaatgtagaactaagtatcgaataagacaggaaagtcacaagctcaaggccagttgagtccccacagggagaacttgagttatcatggaggtttgaacttgaccgatgaccttgaggctgctggctcctttcctccttcctgtacttgaaccatgagcagtactagaaccttctcctgacctcatttactttaaggttttatgtaaattcttttttagatttgggttttttccccctttttaaaagataattactaaaggaaaatttaatcaaaggaaggagaaaaaataaaaaataggaaaaaaacagagccaaaagtgcgtttgacatctttgtggaacacttgtacacttgcttgaaataagccatgaattcggttctcatggccacaagggaaattaattcagtcccagaagtcagtaaacacagataaaaacaattgactgttcaggaagaaagcccctcctggtcctgggacataataaacaatgccctcaactgtcttttactgtcaacagacaatgagattttaggtgttgttcttacaactctgactgtctgatgagagcaaactttattccagtttgttaaaacagttatcctcagcgggccattactctgttctgtttaacagcacatctgtatcttgtgctctgttggaaggtctgctgcagaaaccaactagttagccctaatgccacagacaccattgctattgccatttcacggctgaaaacgattacgtcagagagctattaggcaggtctctcgagtccctcatcagtgaggaaggactcgcctttgtggtctgtgcttttacagcaccattatgacatccttttgtggatagatggatggatttcatctctacaatctacaatgtgatttcgggtttagaagaagatataggcatgcagttcaagtcttcatccaggagcacaccgcttatccctgtcaaaactgtaggtagattcctagccaagctcctgcggcgcacccatctgggtggcacagtgccatctgctcaggctgtcagtgacattagggtccccgggatgggccaccatgtgtatcactaccctttcctgctttacagctagtttgttgtaaacagttagacaaagctgtctttggaataacttccaatactttgtgacctccagcacggctgtcatctgcaaacagaagtgctgatctctgagtggatcaacagaccttggagtttggggacacacaagtgcccatttttaatccacattctcccctctggtctacatcaagatatactacagttgctgaggcctatagtagaaatagggctggatgcctattccttcttaaaaggcaacttgacatcgtagtcggacactgttcactgtttcttactgggatttccagagttataggaaaaacagcctgatagattctctctgtagttaacttacttcacatttctagattttaaatccatttattaaaattcgaaacaaagagcacattggagatttagaataattaggtataatgaatgttcctgagaatttaaggtcagtttctgtgagtttgttttatgttcagaaattaacaactgctgaggtggctaaaatgatgcttgcatttcgtcatccacgtttgcagatttagactacgtgttcgcacactccagtggcatctttcttacaagtacagtctactttgtggcctactgtgtagccatgaaaaataggccaaagctgtatccagaggcagtcttaccaggtaagaaagaatattaattacaaaaccttattattctgtgtaagtgccagtcccactaaatgaacctgaataatcattagagagcaggaaaggggaagaaagagaagatctcagagatgggaagagagagagggagagagagagagctagttctcttaagtgttagttcaccataaaatatgaagcactgaaaaatagatagatagatagatagatagatagatagatagatagagtaggtagatagatagatagatagatagagagagtagagagagagagagagagagagagagagataagaaactatatacaagatgttatgttagtctagagcctaaattgccaaaacattaattttgctgtttcttgtgttaaaggctcttctattcgggtcatcagccttcactattttttatccaccattttaagattagcattgcaaatcagctcctcttgcctgtatttacaataaaagaagtatcaacagataagagtctgaagtcacttagaaaagtagtttatccagaaagttcaaaaggaaaaaaagaaaaaagattctggagtgttaatagaaagtgtgttttgggtcataatcctttagtcattgactgttataataacagtttctcactaaagagttcagcatgattcaatatggagtgtgtatccacaagtaaatattcttacataaactaaagcacctgattctttttgagtgtctggttgattagtagagtagttattgaacacctggctagcacattgcagattgcttggctagggtcttctcttacaggatgggattctatccgcctccagctcagcatcagtcccaagctcactccacagggtgtgtcagatcctgtaccctctgggtccctcccccttcctcagtccctacctcagctcttccttaatatccacgaagggaataactcagcatcttcctcacagaatcctggagcagaggaatcaatcgctcgccttcatttgttgttgtttttcaagaccaggtttctctgtgtagccctggctatcctggaacccactgtgtagaccaggctggcctcgaactcagaaatccgcctgcctctgcctcccaagtgctgggattaaaggcgtgcgccaccatgcctggcatcgctcgccttctaaaagcaaccagaaagcatagctcagaactccagaggggccagtgttgtttataagaatacttctatccgtgctttcacagcccctggtgtaggaggtgtaggagcccgcggcagaggaccgcctgcctcccgcatgtgcttccttgtgttccaggcttgctgtcaggggtgctgtgggccatcgccacctgctgctggttcatcgccaaccactcactaagcgccgtgatcagcttcccgatcatcactgctgtaagtggccggtttcctgggttgttttgacactaaaaatagacaatctgccagtctcgagtcgccacatgcttggttactaaggagcaaacgtttataacctctttttaacaagtttgcaaatatccaattttctacatccctgaatgtggcttccttcggtcattttacctaatgacatctgggatatgttataattttctattcataactctctcaggctcatttgtgtgacactgtagaaatataatgtgagacgaagagttctttaaactcctcttggcactctgtatgcgtccctgggttgaggaagtttttaaaaattatgatgacattaaccatagggactgttgtctgctcccgtgggtttggagggcttaattatgtgaaacataggtaacagcaaaacccaaaatgcttattttgacaaaacctaagtcatgctaaagtcatctccactttgaagatgaagaagttgaggcaccagcaagagtgctgcctgaatcacagaactggtggaaaccagaactcctgagaacagttcccacagctcctgtgggcctctggctcatcatcaccttagacagtcttcagccttctctctatagctatatataaaaataaagccatgtaagccagcaatgggagtccctggtggtaatgacaagagagaaaaaagtataatatatgtatgtgtatatatgtgtgtgtgtgtgtgtgtgtgtgtgtatgtatgtataatgtgtgtatatacatgtgtgtatatatgtatatatatagtgtatgtatatatacataagtattacatatatatacttatatacactatatatagtatataagtgggtattttctttaaggatcttatcgttattatttttaacatgtgtatgcagtgtgtgcctgtgtgtggtgtgtgtgggcatgtgtacctgagtacagatccccctggagttagagtagttgcaggcagttgtgagctatgtaacatagccgttgggaacagagcttgggttctcagcaagagcagtcatgatgggcccttacctgttgagcctccaccccagtgatccgctcttctgacgagctgttctcctgattcctaaataatcaacccagacattccttccttaagtcattttagtaacacgcttgtgtaaactgaaaaaaatttaaccttgactagtttaaaacagatttcataaaggcttggtgtgggtttcaaacagtatttgtctgtttccaagacggtgtctttgtagcccaagctggcctcaagtttaaaaccctcctgcattagcctccagaatgtcagaaatcacaatcatgtctcaccaagtctggctcacacagtgttctttggattgctctgtatttatcaaataacctgcaaacaaaactaagttcaaataaaatctaagtggtatttttgtttagacagcctgcatgttggcatgagaaggaagtgcctaagtctgcaagtctcaatcgagtttttattagatccaaaatctttatttttccctttttttgggggggggggtgtgggaggttctgagacagagtttcactgtgtagtcatggctttcctggaactcactctgtataccaggctggcctcaaactcggaaatccacctgcctctggctcccaaatgctgagattaaaggcgtgcgccaccactgcccggctagatccaaattctttatgaaaggaaggagagggaggaggaggaaggaagaccccattccccagtgcgtggacccccactctctgtttcctttctgctctggcaattctaaaactaaatacatcatttagaaggcttcgttctcattaatagtgtctatgcaccaagcatcatgctaagttttaggcttggctgcctgagacagaaccaaacccacctttcctttcacttagatgtcaatgtgtattattttacaaaaagaaaatacacagttcacgcatcccaagcaattgcagctactgtgaaatggcctctctctctctctgtgtgtgtgtgtgtgtgtctgtgtgtgtgtgtgtgtctgtgtgtgtgtgtgtctgtgtctctctgtgtctctctgtctctgtctgtctctgtctctctctctgtctctctctctgtctctctctctgtctctgtctctctctgtctctctctctctgtgtgtctctctgtctctgtctctgtctctctctctgtgtctctctgtgtctctctctgtctctctctctgtctctctctgtctctctgtctctgtctgtctctctctgtctgtctctctctctgtctctctctctgtctctctgtctctctctctctgtctctctctctctctgtctctctctctctgtctctctctctctctctctctctctccagggctctcctttgcctgggctatacattacattagcacagtatcacttcctgaaaccacatatatcttcacagccatgctcagagcatgggtaaagggcaattttaaacatcatcaggtaggatgcttcagaggccagggcaccctatggtcctttcttctctggagagaattgcgttttcagaatgaagaggataaagatccctgagcagccagtgtaatattgatgtttcggcccgcccttacaaggcacatgcttctcattggagttggattcctgagacaagcactttgcaaatctgatgtaaggcgcttcctttgacctatttttctgccccctttgatgctgacttcgcagatggtgataagtggagaacaggacatttttattgcttcccttccgtgctagaagcagcggaatcaaactttattgggccagccctgttagacagtgggagtggtgtgggagagagaacattgtggaattgtttattgaagctcttccagagtccctgcagcgcttgaagaggagtcattaaaattctgctctcgtaggtctcgtcttcaccgacatcgcagctaagccaactccactgttttccttgctggtgaaaaacattccttccagacctgaacagcttcatgttttcaaactgtagaaatgtgcattttcttgtttcttcccatttcccattctgtatacttttaactcttatccttgcctccaggagctcccattgcttgcttacatggatatatatatatctccatccatacatggatacacacatacacacacacacacacacatatatgtatgcatctctttagcgttacttcaggtttagtgttagacaaagttgattggtccacatggtggcctggtactgccattgtctatcaaagatgcccttgcttcatttaggagatcagatcatgtagctaatgctgagaaagataatgtgtagtcatacgcttgattttatgaatctttttatgtgtgtctaagaagtacatcaagagacaaacaagctatttgtttattttaaaagaggaaggttgggttgtttgtggttcagttggttggttggtttttgtatttaggtttaaaaccaggacttcccacacaggagggaagcacagtgccactgaggcatagcccctcccttttccaatattactctgcctttttagacaggttagccaggctggctttgaactcagtctttaaccctgcaagccatcaatttttagttctcctgccttagcttctcaggtatccaggactacacacccacactacaagacctgactaaagtagtttattgtaagcatattgcactaaagaaaattgtttaatgtgataaaatattacagcatcaccaaaataatagcaataatgaccatgaagacaaaaaatagcaagaaaaagaaagaaagaaagaataagaaagaaagagagaaagaaagaaagaaagaaagaaaagaaagaaagaaagaaagaaagaaagaaagaaagacaaagaaagaaagatagagagaaagagagagggaggagggagggagggagggaggaaggaagaaggaaggaaggaaggaaggaaggaaggaaggaaggaagaaatctgtcttatttaaagatgttactttgattttttggatgaacgtggaactatagtttagattatagggttgcctacccaaaaaaattatgttgcttatagcttactgtatttttctaggatgcagttatattttttttaaaaatccaataaaattaaagcctttttttttttcaatttaagggtcctggacttattgctgcactttgggggatactcattttcaaggaaatacaggtaaggatgaagaaatgattgctgtccccggatctcagtcttaagaactttggatagatgatatatttcttctttaaacacagttactgagtgccctgttctgaactagtaccagtagctaggttaagacttctgaaagctaaggcaaggattttaggagacctaaagcgctagtgtggaactcacatacatggcaaatgtgtgcaccagaagctgggccccgcctggcagctctgggtgctgcaattccccagtcgagaactggacaccgtctctagtactgaggctcctagcaagtcagacaacttacctggcctagacccagcctacaaagctctgaccaaagacaaattaatgtgctttaacctgattccttattaaattgcaaaaagaatatgtaaaacttaggtcttcgaattacattttaagggtaattactcttagcaatagttttttatttactttttcatttatttatgcacgcatgtgtcagtgtgtaggtatgtgcatgcagtggctagaagagggtaccggctgccctggagctggagctcaggctgttgtaagctgccccatgtgggtgtactgggaactgaattccctgttggaagagcagcacgtcctgttaaccactgaaccatctatccagccccaagtgtgactaatcctgataagagctatgaatttaaaagcagagtcccttagcctctccattctgggtactgtttcttttgtatctgaggttgctgcacaaatttccctctactctgaatttgtcagaaatgaagcccagtgctcctaaggaactgccaggaaaaaatgacaaataaaaagcaggaaaactcagtgtgcagagagagtcctgctgtgtggttaggagagctagcctcatgtacaactgtcagtttggcctcttctgttggactctgattcaggaggcaaccacactagggcactccttctgctcttccctcacagcagacctggccaaagggcggtaaagagggaacccttccctcaactttaactctgacatgatccacccacaccactagatttccactcatgcttcattggccaggcattcctgggggtgatgctgagaaatgcacctctcagctctgctgaggatcacccatgagcagcacccagccttcacagattcactctgcacaataagtcagtcagttctctgcagagacacggcatcccatctccagcctccctccctattagcccctctcttaagtaccttcaggttacctgccctggtgagcccaatttagtcagagttttggtgagaggagggtgaccaccttcactttccctacagatgtgacgaaggctgcatagatattcttatctcccccaccccaatggacctctcagaatccctgtgtgttcacttcatgtccacagttaaatcatatcacttctaaggaaacggccaatagtagcattctatgatttctgtgttagatgatctacaacttaggaagggaaactagttctgttggtaaagtgtttaacttgaagcatggggacctaagtttggtcccaggatgcaagtatggtggtacacattgtaatccaagcactggagaggcaaagaaaggaggtccctgggactcccttgctacccagcctagcctccgtgacaaggccactcaggtggaatccgtatctcgagtcagtgaggcagtattctggttttggagtgtgcagatcttgcctgacagtgttcggagtctacctgtacaaaggcgtgagtgagtaccttacaaaccatcattcagaaagaaacagccaaggcaaagacggtgctgggaaccattctatgtgaaaaatgactgaaggggctaagatattacccaaaagggatgctcagggaccgaggaagttcgtttcttgctgtttgagggtttaatctcaggaggcagctattgaaatcgatctatgtgtacccctgaagatagacatcatggaaatgaaatatgtctgcttacagcgggaaggtatttctttgagactcaggccatgactgtgctgtgtcgggatgaggcaattcatgccttccatctttaacatgagtgcccatgcatagcagcaaaagctagtcttccttgctttagacccacctccatcctaccactggtgtgttccatcttctttctcgaagaaagaaggttgcctccttggtctccttacattgattctggcccctcccatctatttcacattctcaaaaaaaaaaaaaaagtagaatttccagaatgcaaatctaaaatttcagcacctacatcttcctgctcctttaatgccttcttattgcttgaaaagataagacctataggctcttgaatacccaacaggccattcaccccccagccccaccgtcttagttaggatcttatggcagtgaagagacaccatgaccatggccacctttataaaagaaaacacttaactggagctgtgtcatagttcagaggcttagtccattatcagcatggtgagaagcatggtggtatacaagcagccacggtgctggaaaggggctgagagttctgcatctagatctacagggcagcaggaaggagactgccacactggatgtggcttgagcatctgagacctcaagacccgcccacagggacacactgcccccagggagggagagatggagagagggagggagagaggaagggaaggagggagggagacagagacagagacagaccagcacaccaatagccagagcatatgacacagtaaagatccatgacagtcgttttaaaatatacatgttgtaaatttaaatttgattcaagttttattcaatgcagccgttcttttttttaattactcagggtctccgaaactacttactgatgatgctcgctttctgcatcatcttagctggggccttgtgcaccgctttttctaaagtgtagctgttcacggcaagagcagcagagggcagcagagggcagcagcggctaggagaaggacctctgctgcgcaagctaacactacaggcagctaagctgtggcactgtgggtctctgccactctgggaatgaacggataaatggctgttggctccaccaacgtgagaacgcgaagagagaccgtgtttcagttcagcgtgtgtgaaaactcttttcgatgagctattaacgaaggctggacctcgctgggtggctcaaaggcatatcggatcatcctgtctaacaatgtctacttaatactataatccagaaaataggatggagtttgtacaaaagaaattaccatcccaatttataatttattaataaagaggacccaaaataagtactttcttggttgtgggaaggaacacacacataccttgtggaatttacattcaaagatatcggcccctttgctaagagcaaatgtcatagttgcaacctgaatgtttaaaatgccatttcattttttttttggccaaaaattattactttaatactactcggctctttatcttgcctgaccttcttagctcaaaatgtttgataattattccagataaaacggatcctcagagagcaggtcaccaccactcctatgtacgtgtgatataatgtatacattcacaagcacacatacgtgtgtgcatggtttcagatttggacacattctagagttgctgaaatagcagttttagttcatcacgttcaacttaaaggaagccgacttgtttgactgcacaactaattttttcctccttaaacacagttacttaaaagatcattttaactggaagtgtttcttttgaccctattttaactgatttccaggagacaaaagaaggtagcatatatattgatttgattctttaagggaaaaaaaaaaaaaaacacaggcacattgctcacaatcatgctctctgcacccttaatagaataatggtgtttggctgtgcctttcacccattctctcctgatattgcagtactttgttgtgccagagcaacagaatagcatcctgcacctgcctcggcttaaacctcagatgctccgtctgagttgtgcagctttggacctgagagctctctcggcatggcaggcttcctgggaaggagggctagcgatagcatgtgccttgaattctgttgtccaaatgtctccttgcctgacaaacactctaaacttctttgctattgttactacatgttaatcaaggggaaacaacgtttacaggtaggaaaaacttacaacttataaaaactactggacttaccaccctcagcccaattgaactttgtcttgccaaatcagaaacatccctggagtcccttctaatcattgaattgctcacacaaataatgtttgatattaacaatgtcttttttctatttcagtttttacttgaaatgtcattaaattgtgatggtatggcaatttctgaataaacatgacagaaaaactatttcttttcttctttagatatatatttagaatttcatggtgggcagcctttattctttgtgaggtggccaattttaaatgggaagtaaggaaattacagagaaaaaaaaacagtaaaagaaaataaagagcccttaattccaccccaagcaatccaagcaatgcctacaatgttaataaaagtattgtgggagaaacaagcttttccaaaatggttaccaaacaatttactgttcatggttacgttatagggacagatctgagtcctagcacactcaatggcatttgctgggttccttatcttttgatacagggccatgtggttattaggaaaggggagacactctcttcaggctgatgagctgaggggaaggctcaaacagtgctggctagaagctgcaggaccctttctaatcaaggacgtagctccacagttgtaggcagcctagtgaggaagggcttccagtcctctctgtcctggtttctgtgggttcatcttgatgtaggttttagggtctgtctgtctgtctgtttttgcctctcccctcctgcagttttgtaatctcccctctgtccactcatcctcagaggtgagggtttgaggttttcattccccttgtgtggtaaacagagtctgctgttttgatcttttcaagttgtgctttctactgaaccttaatgaaaacggcagccacgtttgtaccagagagttcctgcccccttgtgtccagaggcaaaactgcataaagtgaaaggagccaccccgtaaggctgatcttcacactgtgggacatgcagaacagaaaataaagaatctagggcttagcaatatagcgtttcctttgagctaccaatgggcctttattcctgacttacttcatttagtgtaactggctattatacctgttggtgctaaaagtcacatggagttgaaaaaagtaagctgtacaaccttgtgtatagtttgatacacttgaagaaaattgctagtgatcaaagtgacccacatgtatatttatataaaacattaaaaaccaatgttcaccaggtggtgggggtgcacctctttaatcccagcacttgggaggtagaagcaggcagatctctctgttctgcagagcaagttctaggacaaccagggatatacagagaaaccctgcctcaaaaaacaaaacaaaacaaaaaaacaacaaaaacaatgtgtcagacttatcgagatggcttttgggacctcgaaggagattggcatgttaatgttgggggagagaaaagctgtttgcatcaagcagtcatgaaaacatactcagggtttgttatagatgacacattttcagcatcttttgacacatttataatttttaaaagaactggagcaggagagaccaggacttctcttgagtatagacaatgaagttgagtctttgggttgaaaataagcaaagaggaaaacagctctgggtgtcctagcagcgtaagtccgtcgcgtgcaaggttactgtgaacattctcagaactctaaagtgaccgaggggcgggtgtgaacagtcagcccacttacactcctgctacatctccagcacatctcatttaaatctagcgcatgggcagttacagctctctgtaagaacccttggacaaggcagaacactgggaagatctccttttccagatgggtgcttgttttcctgagtctgtttctgtgctccttccaaccttcgagttccacccagaccgtgcctgccatgctttcaaatactgcagactcaggaatgcatttgaaatccgccgtttcatcagcactgtgtctgtcacagataagggaactcccctatcgccagcaccacaggcttctggtcttcaagcccttcttaaccctccctaagtacacaagcatcctgattttaccagacagaatttctatgtatcttgtagtttcccctcactgatgtaaatagtcattaagtcattatgaagtcaaaagagcttacaatttcttggcatctgttaactcacacacgatgatacagtgtatgaaagctgttctaatgggagatctttaagtcctctctagtcatcacagagcaatagtgggccagcaagttgactcaagagagtaaataagatgcttgctgccaaacctgacagcctgagttggaccctgcgactcgcacagaagagggattggactagagaaagcatacaacgattcgtgcactgttaagaatggtacatacattcatgtccataaataatgggaaagataaacaaattgcaatatgcttgccaactatgatggaataacaaaaacaagaaataaaccaccaacacaggcatggaagtgttttatctttaaaactattagacaagatgggaggaaaaagaaagaacctctaatgcttatcagactgcgcatcattctctcatataaactacaaggagtcaactggggagctaaattgatggcttagcactggctgatcctccaaaggtcctgagttaaactcccagcacacacacagatgctaacaacggtctataactgtagtctcatgggatttggtgcctttttctggtgtacagacatacatacaggaaaaacacgctcatatacataaataaggcaaggactcgataaatggctcaggggttaagagcactgactgcttttccagaggtcacaagctcaattcgcagcaaccacgtgggggctcacaaccgtctgtaatgggatctgatgccctcttctggtgtgtctgaagatagtgacagtggactcacatgcataaaataaatctttttttaaataaataaataaataaatctttttttaagtcagattttctacttgattctcttatttgctgctcactaaattccatgtgtgttattctcctgaggatcaaataggcatctgctgacaagatgtcctagccctcaagaggacagcttgggtctcagcctaatagaattatccatgtcttccttggagtcactgccaaagatgaaaaagcttataaaactagagctcctctaagatgagactttcaactttaatgactggaaaattcaatcaaatgcttaaagtcagttattctcataacatcaggaacctgattgcacaactttaatctttgaggactagtaatcattcatatggaaaaatgcagtttcacacttggccaccagaggggagtgtgtgcctgcttgataatttgggatcagctcagaaaccgcacacatcctctgccagccccatctctctcctgaaactatcctcaccatctctctcctgcaactatcctcgttcacatatatgacccgtggatgactgtaccaagagcgttcatgtgtgaaatcactactgtttcatttatgtcccagctgtgcctctaactctccatctgtctctcaatggtgtttttcattgtccttttattgggtgtttggacttcatcatgtagtttcctataaggtgggaaacatcacaaataaacttgtgttagaagtatggaagnnnnnnnnnnnnnnnnnnnntggcagtgactctccactgactcatcaggctgcacagcctcggttctctcagagatgcactagtaattctttagcctaattagacatttccaggtcacagagacctggaactatttgccctgttatttttgaaggcctttttccaatcagagcctgaaatgtttccccagtgggctcattaagtcaagcacttgctgtaactacacgaccagtgaatgtggaatcttacagacttaactctccctggcagactggtctgagaaggtatgtcaccgtccctctctcctgggtatggaattatactgggcaaaggtgatgtgcggccatgagactgtgtttgtttcggttctgaaacacctagtggaaaatcacaacacaagacagaaagttggagatggctgaaatctcatcacaaggcaagatgctttgcagaactgcctcctttacaggcttagagacatgccctgccttgcattggggcactttattcttccacactcccaaagcttaaaagtaatattccctgtgtagcgagcgtcttggcaatatatctgttcacctcaacataagagagggacatatttcttaactctgaggtgagggaacatcaaatcagtctcactggattccagcagttgtgtgtgcatcctgtggggaggtgggaaacacagggaagtttcatattggatgcttgcacggcagagagactttctgtgagcagcagaccacacacgcctcctgatttcttgtaagtgtatccgttttcaatgactgatgcaacaattgtagatgtccaatcacctatgattaaccttaatattgcatagtgctgttttgttttgttttgttttgttttgttttgttttgttttgttgggttttttttccagagcagatattgttccaaggctacagagccaatataattttctcagcttgtgtgcagtcttccctggctcccttccttagctccctaactctgttcatccaagaacacacttcgagaagcccatcaaggggccccattcctaggcaacacccttgcctacaagaacacacaaacaaaaactgctctatttatgggttggggttcaaaactctcacgaagaaaactcttccaagaatgagagtttgaccttttctgcaggattcttatggtgcctatcagttctgtctgggctgaacatcaatttcattaaattaggtttgcatatnnnnnnnnnnnnnnnnnnnnttctaatggggagatctttaagtcctctctagtcatcacagagcaatagtgggccagcaagttgactcaagagagtaaataagatgcttgctgccaaacctgacagcctgagttggaccctgcgactcgcacagaagagggattggactagagaaagcatacaacgattcgtgcactgttaagaatggtacatacattcatgtccataaataatgggaaagataaacaaattgcaatatgcttgccaactatgatggaataacaaaaacaagaaataaaccaccaacacaggcatggaagtgttttatctttaaaactattagacaagatgggaggaaaaagaaagaacctctaatgcttatcagactgcgcatcattctctcatataaactacaaggagtcaactggggagctaaattgatggcttagcactggctgatcctccaaaggtcctgagttaaactcccagcacacacacagatgctaacaacggtctataactgtagtctcatgggatttggtgccttttctggtgtacagacatacatacaggaaaaacacactcatatacataaataaggcaaggactcgataaatggctcaggggttaagagcactgactgcttttccagaggtcacaagttcaattcgcagcaaccacgtgggggctcacaaccgtctgtaatgggatctgatgccctcttctggtgtgtctgaagatagtgacagtggactcacatgcataaaataaatctttttttttaaataaataaataaataaataaatctttttttaagtcagattttctacttgattctcttatttgctgctcactaaattccatgtgtgttattctcctgaggatcaaataggcatctgctgacaagatgtactagccctcaagaggacagcttgggtctcagcctaatagaattatccatgtcttccttggagtcactgccaaagatgaaaaagcttataaaactagagctcctctaagatgagactttcaactttaatgactggaaaattcaatcaaatgcttaaagtcagttattctcataacatcaggaacctgattgcacaactttaatctttaaggactagtaatcattcattcatatggaaaaaatgcagtttcacacatgaccaccagaggggagtgtatgcctgcttgataatttgggatcagctcagaaactgcatacatcctctgccagccccatctctctcctgcaactatcctcgttcacatatatgacccgtggatgactgtaccaagagcgttcatgtgtgaaatcactactgtttcatttatgtcccagctgtgcctctaactctccatgtgccatctgtctctcaatggtggctttcattgtccttttattggtgtttggacttcatcatgtagtttcctataaggtggaaacatcacaaataaacttgtgttagaagtatggaagtgcagagtgtgtccttgtcgaatgccaccaacagctggggcacagctacgccacaccgttccctgatcacatggcagtgaatctccactgactcatcaggctgcacagcctcggttctctcagagatgcactagtaattctttagcctaattagacgtttcaggtcacagagacctggaactatttgccctgttatttttgaaggcctttttccaatcagagcctgaaatgtttccccagtgggctcattaagtcaagcacttgctgtaactacacgaccagtgaatgtggaatcttacagacttaactctccctggcagactggtctgagaaggtatgtcaccgtccctctctcctgggtatggaattatactgggcaaaggtgatgtgcggccatgagaccgtgtttgtttcggttctgaaacacctagtggaaaatcacaacacaagacagaaagttggagatggctgaaatctcatcacaaggcaagatgctttgcagaactgcctcctttacaggcttagagacatgccctgccttgcattggggcactttattcttccacactcccaaaacttaaaagtaatattccctgtgtagcgagcgtcttggcaatatatctgttcacctcaacataagagagggacatatttcttaactctgaggtgagggagcatcaaatcagtctcactggattccagcagatgtgtgtgcatcctgtgggaaggtgggaaacacagggaaggtgggaaacacagggaagtttcatattggatgcttgcacggcagagagactttctgtgagcagcagaccacacacgcctcatgatttcttgtaagtgtatccgttttcaatgactgatgcaacaattgtagatatccaatcacctatgattaaccttaatattgcatagtgctgttttgctttgttttgttggttttttttttttccagagcagatgttgttccaaggctacagagccaatataattttctcagcttgtgtgcagtcttccctggctcccttccttagctccctaactctgttcatccaagaacacactttgagaagcccatcaaggggccccattcctaggcaacgcccttgcctacaagaacacacaaacaaaagctgctctatttatgggttggggttcaaaactctcacgaagaaaactcttccaaggatgagagtttgaccttttctgcaggattcttatggtgcctatcagttctgtctgggctgaacatcaatttcattaaattaggtttgcatatggtttcaacagacaagtttgtcttcaaaacaacagcaaagatacaaggaaaaattaaataccacttattatcttccaataactcaatttctattttctcatacagtcttagagactgtttttagtatttccctaccaaaattgaaggacatcattaatatctttgtgtttatcttacacacctgctgtgaatgttcacatggtgagagaggtacacattgaaagtttggattgatactgtcaaaatgctccacaaaaacattgtaactaagtttgagcccttctttttttaaatttttttcttagatattttcttcatttacatttcaaatgctatcccaaaagtcccctataccctcccctccaccatgctccccaacccacccactcccacttcttggccctggtattcccctgtactggggcatataaagtttgcaagaccaaggggcctctcttcccaatgatggccgactaggccatcttttgctccacgtgcagctagagacacgagctctgggggtactggttagttcatattgttgttccacctatagggatgcagaccccttcagctccttgggtactatctctagctcctccattggggtccctgtgttccatccaatagatgactgtggccatccacttctgtatttgccaggcactggcttagcctcacaagagacagctatatcagggtcttttcagcaaaatcttgctggggtatacaatagtgtctgggtttggtggctgattatgggatgaaccccagggtggggcagtctctggatggtccatccttttgtcttagctccaaacttagtatctgcaactccttccatgtgtattttattccccattctagggaggaatgaagtatccactcattggccttccttcttcttgattttcttctgttttgcaaattgtatcttgagtattctaggtttctgggctaatatccattcatcagtgggtgcatatcaagtgacttcttttgtgattgggttacctcactcaggatgatattctccagatacatccatttgcctaagaatttcataaattcattgtttttaatagctgagtagtactccattgtgtaaatgtaccacattttctgtatccattcttctgttgagggacatctgggttctttccagcttctggctattataaataaggctgctatgaacatagtggaccatgtgtccttcttaccggttggaacaccttctggaaaaatgcccaagagaggtattgctggatcttccagtagtactatgttcagtattctaaggaaccaccaaactgatttccagagtgattgtacaagcttgcaatccgaccagcatggaggagtgttcctct

SEQ ID NO: 799 - DNA, 1604 bp, Mus musculus
ttaaactagagcaggcggcattgatcgagcgccggcactatcttaaacgcaggggaggagctgcttaaaactttaaagtagtcgggagaaaaagcagatataccagtaatgaaacgaaagtagtaaattttttagaaagaatgaatgtagcttaataaaatattaagtggatacttaacacgtaaaccttagaatccttggacttaagacttttccacggaatgttgaaagcttttaccttggagaaatacgaactatttcgatagctgctgcctggttggtaatctgtctaagctaaggcaataactgactggagttgattcagcagtcaaatgaggtcatgcgctctaattagcactactaattattcatccaattcaggctgaaacctgtggctgcccatcaataccccttagtggagccttctttcctgtaaaataatctacctcattaaatgaatctcctgtaaaaacacagatcgaaagtaagacgggctgctgtctgctaccctgcaaccatgagcagcaatgcaacagacctcaccaccggctacctctcctctgctgcggcaatcctcctgtttggctccaactttgtaccacttaaaaaatatgacactggcgatgggatgttccttcagtgggtgctctgtgctgccatttggttggttgccttggtggtcaacttgatactgcactgccctaaattctggccgtttgcgatgcttggcggctgcatttgggcaacaggcaacattgctgtcgttccaattatcaaaaccatcggtttaggacttggaatcctaatctggggatcatttaacaccttaactggctgggcaagctcaaggggctgcagccttgcggtaatatctggaatactctacggatcgacatttgtgccaatcatttacatcaaggatcacagcagaagaaatgacagcatgtacgcaggcgctagccagtatgatttagactacgtgttcgcacactccagtggcatctttcttacaagtacagtctactttgtggcctactgtgtagccatgaaaaataggccaaagctgtatccagaggcagtcttaccaggcttgctgtcaggggtgctgtgggccatcgccacctgctgctggttcatcgccaaccactcactaagcgccgtgatcagcttcccgatcatcactgctctggggccttgtgcaccgctttttctaaagtgtagctgttcacggcaagagcagcagagggcagcagagggcagcagcggctaggagaaggacctctgctgcgcaagctaacactacaggcagctaagctgtggcactgtgggtctctgccactctgggaatgaacggataaatggctgttggctccaccaacgtgagaacgcgaagagagaccgtgtttcagttcagcgtgtgtgaaaactcttttcgatgagctattaacgaaggctggacctcgctgggtggctcaaaggcatatcggatcatcctgtctaacaatgtctacttaatactataatccagaaaataggatggagtttgtacaaaagaaattaccatcccaatttataatttattaataaagaggacccaaaataag

SEQ ID NO: 800 - protein, 264 aa, Mus musculus
KHRSKVRRAAVCYPATMSSNATDLTTGYLSSAAAILLFGSNFVPLKKYDTGDGMFLQWVLCAAIWLVVVNLILHCPKFWPFAMLGGCIWATGNIAVVPIIKTIGLGLGILIWGSFNTLTGWASSRGCSLAVISGILYGSTFVPIIYIKDHSRRNDSMYAGASQYDLDYVFAHSSGIFLTSTVYFVAYCVAMKNRPKLYPEAVLPGLLSGVLWAIATCCWFIANHSLSAVISFPIITALGPCAPLFLKCSCSRQEQQRAAEGSSG

SEQ ID NO: 801 - DNA, 73742 bp, Homo sapiens
  misc_feature (1)...(73742): n = A,T,C or G
atgctggaatattttatttggtggctggatgtgctatgatgaaattttctatcatgtcatgagatgtctgcatagagtagcctgtatatctctgagggtagcctggattaacccaaggacatggtctaggagaagccaggataaggcaaatacagatgacaaaggggccaggggagttgggatcggggaaggttataatactagggccaactatacccacagggacctaaagcatacggacccaagcaaagcagatgtaatgaatagaagagctacagccaagtaatcataaaagcagtattgaatcccagaaacaagcaggtaacaatgagctaatatgccagaaacaaaactggaaaggtacgtgtacagactggaaaaggattaataaactgagatcagtatcagaaaaagggacgaggcagatgatgaggctgggctgtaagacaacagttgggatcctacccagtagatttcattgcagtagatttttcccagtacaatgttttaaagtgggcagacaaaaggcttctttctggttttgtttcgtttttttattatctgcttgcttggtttacaatatggccctatcaagactgtattttaaaagatagcaatcagtatatctgctcttggtctatgtattcttggtctctgaataaaaggaagattatccatgagctagatcacagctgattctcccagttgtcctggctgccacagttgatttttttttttttttttttttttttttttgcttgccttcgggttagccacatcccagcttttcccaaggaaatttcagttatagttataggagccatctcatcactttttctaggagaaaatcaagtcagtggtattacaggagttggttcctcataccaccagggttagaaattttttttgtgtcaaaaaatgtacaggcttcctagcaccagataccggtacacaaagccagaccacatttggcctaattttaggactcaagggtatccaaggctggcaagatctatgccgggcacttggagctgttttcttgccttcttcatactaggcctatttccaaggggctgggtacagatcttgttttcacttgttttgttttggacaaaattcttgaactgctcctacgtggactcttagtttttgatctgtaccacttgaaccatacaccccaccctgcaccccttgccctcactgtgcccattcttgctttatcactcattcttgttttgacggtcctacaatactcccctcactcactccatggtagaatttgaggaggactagatctgagtgagacactattataaaagatgatctcagaggaaagctcagagctgggccaaagccttgtaagcctttggaaggactttggctattacttttagaaaaatgggaaaccactagagcaagcttgtccaacctgtggcccaggccacatgcagcccaggacagatttcagcacagaaccacacaaattcgtagactttcttaaaacattatgagatgtttctgcaattttttttagcgcatcagctattttagtgttagtatattttatatgtgatccaaaacaattcttcttcttccactgtggtccagagaagcccaaagattggaagcccctgcattagagggttttcagctgagaagtggacatggtctaaaaataatgaaaagggatcactctggttgttatggtagaaataaacagcagagggagcaagagtgaaagtaggaaatccagcacaataattcagattgacatgatggaggctcgatccaagttgtcacagtagaagtaccaagatgtggtcagatccacgtatatattttgaaaattgagggaaaggatttcctgacagattggatatggggtatgagagaaatgatggaggcaaagctgactaagggtttgggtctgagcaattatttaaaaacttacatagtgtttcaggaaatcatgattgtgccagacataattctaagcactttaccaatcacaactcatttaatcctcaaaacagcctatgagatacatgctactagagtgcccaaacttgatgcacagattgcttacatgatttgtgcaagttcccagtgaatgttgttgccactaattgagatgaatcagtacaggagtagaacagatttggagcagaactaggagcttagttttacactttttaaggtctagagactactaacaacccacttgtccaggctcagtcaacttttgctttcagctggtattagtccatggtgtatacttcttacctgcagtggttatatcaggtactctaggctggcaccaggggtcccacagcttggtcatccactgaagctagtgatatgctggtaaatgcgtaacaaccagccctccaagggaaaagaaatctagcatttgctgagtatttgctgatttgggtggtgtaaatattcacaccatagctgattttatacaaccaccatgatgttattaaaaatggacgttggaagagatgcacactatctgccctccgctgtagtgtgccaatgactgcagccactgcaataattttaaagccctagttaatatctagaaatggtatgtcagggctctcaagtgagaaggagaatttatggttggagacatagccaaagtagctgggaaaaataagttaggcgcttgaactagagttttaattatgtatgataaaggaaatatagacagaataaattcaaagagatggaataatggaggggctgcataactataggagagcgaaatggttggaatagccgattctgcgttaatgtcatgagggtggggagcagacatgactatgatggaatctgaagagattttaaagtcaggtcagccaatcagaagaagtctcagaagtaggtaaaggtgcaaaaatgacttttattgctccaatcagtgaggaaagaagcatttgagaacttcaatatcaggcagtagcagaaacactcaagtgtttgctaaatgactgctcctacaaaacacctgatccaggaggaaatttttaaaatgtttccaatgcagtgtgtccagggcaggtaaaggaaaagctccataagtgatttatgtataatataagatttgggaacctggtaagtaccaaaggcagaaggattcaggatatcaaggagtcccaagagcaaataaaggacacctaatgataagagtagagtttagggtcagaacagcactgactgaaaagaatagaatgaagatgacacagcagtgacatacataggtgggatacataggtgagaactgatgctgagacctaaacaccaagagaagttaagcatgcttagcaaaaattcagaaagggtcctgtacacatcaccaagaaattttttaagtttattctaaaggcaatgggtgccaagagaaaataccattcagggaaatgacatgatgatttacttttaaagtagtgtggaagatagaatgcaaataagcaagaccgaaagtaagtgaactaattaaggaggcacatcatgcaaaagatgatgagagtgtgaacaatggctgtgacaataggaatggaatagtgagtctgtttatagagctattttagagttagaactgacatagcaggatatctggatatggatatctattgaatatagaaggaataggcagaaattaagaataattcccacatttttgactatggagagtgaaagagaaaacttgaggaggattcccacatttttaactagaatgattcagtaagcagtgtcattcagggagataggaatctaagaagaaaaagagagatgggaaaatgtgtgttcatcaggactcttgattgcaaatgagaggaaactcatctgccttaggcaaaaaatgacttttattgctgcaccgaatccaagaaagaattaaaccaacaaacaatggtatagtggactctggtagctatagtgctgtcttctcagaatgtattacaatatcctttatagtaactgtacccttcacttctcatgttttctgtaaagctgtgtctgactctgacttatccacagacacagaagtagcatatgagctgggtctagccagagtgattggttcaaaggtggtcatgagacctaaactacaccaatcaggagccttcattagacttttcccctacagcctttgtcttcggggtcatcctttaggaaggatgaaaagacactggagcagcttgcagccatcttcctcagtgccctagaaaaagcataactgcatgaagtccagttgagactaattcaaaagctaaaataagcagaaatgggagatatataaaaacagaaaactagcagtcctgaagtgccagaagcataaatagaggcctggttactgcagctatttgattatattagctactttgatgtccttcccaattatataagaaaatgaatactttttttccttcttagtatagttagcaagggtatccataatataaagtacaagattcttcattaatacctgttgaaaagatagcctactgagccccaggaaaaactagatctagccaccagaatgtcaccagaatctagttttctacctttcatctgtacctgtctctggatgtcagttttattctttctcactgcagactgttttcattcgtatagtcggaaatgtgactacaaacagctcccaagttttacttctgataggttttatctccgaagggaactgccttttattttctgtgcttccaatttcaaatattctaaggaaggattgtaactgacccatcttgtgttacataatggatcaaacagttgtaactagagtcttaaaatactatgattggcttagcttgggccaggttgacattcctgaaccaatcaaatgggagccagggtggtgggctcatgcaagaaaatggcaatgctcatggaagctgtaaaattagaccagggagagaaacaattctaagaagaatagaggttctatttccagaagaaggacaaatgtagctataagtgcctcttgtaggaaagatggtattttaaacatgttgaattgttgaatttgagaccccatggaggaccaaaaggaggtcaaggaaatgcggccagttgaaattattactcaagcctgcaagagaaaatttatgcatttatctgattttgatgaaaaagattatttcagattataaatttcaaattccatatatggttttaccccaaatttacctaggtctctaggtttcaaaacaactttgcacatgtaaaatgattatgcactgtaatacagtaattgtcaattaagagaaagggttgtgaatcacagaggcaagaccttaggagaaaaaaaatcctgatctatgtttctcccctatgaggaaagagacaaagctatggactagcagagcctgaagaccccaagatttttggtctaagaaactgtagtattgcaactgataaagggaagatatgtctagggcaggtttggggtaagtttgagttgtctctcagacgtccaagtggagatactgagtaaggtattagatatatgggactggatttcagaagagtgatctgggaactccaaaattaagaggttaggaataaaaggaagagccatccaaggaaactgatgaagaagctttgagagtaaaggagaataaccaaggtaatgtggtgttctagcagccatgtgaatgcaaaacctgaaagagaagggaaaaatcaattgtgacagatgctgctgaagagtgacacaaataacgacagagaattaaccattagacttagcaaactggctgccactggtgattttgacagtttctatgcagtaagaagagcaaaaggcaagagttacactttagccacaaatgccagccgacaaggcagaaattagatgggtcgttgtcctggaaactagaggatttatgagacatagcatctaacatcttaggactctgattcatctatgttcataatgccctgaaagccccaccccttccctcagacacaaggacactacctgagggagataactcggggggttggagggctgtgtaataaactaagcgttgtttgtgttttactttttgccaaggcagactattgataaagcttctgcctaaattaacagatcaaactaagctttaaatcaaagttaatgttttttcttcttaccagcaggtgtagagaaagaacaaatcaactatgacaaaactaataaaactatattttatcctcatgttggatgtgttacctgtgttaaatctttaaccctcatgtgggtcaaatttttcttatgttttcactagtaaacttcccatatcaattcatagcttatgcttgataattttttcaagcatatctgattttttcttacaatcattaatatttgacaactgttaagctgtatcttactggtgattttggttcatgaaattgaataatatccaggtaaaatcctaaaggtaaaaatcaggataagtttgaaaatgggtcatccacctgaaaagtagaagaataatgggaagagagtcaaaatgagaggactcaggagttagaaacaaaaagagagagagagagagagaaggggtagtggatgaagcaggcttagataatttttgaaagtgcatgtaaaaagacacattacagttttcaccttctatagatacttatttgcatgtgtatttcagatctcattaaagtttcagaataaggtgcatatctcacaatattttggaaagcatattaagaactaataacacaagcactgaaatcagagaaaatttggtttaagaactagcactaccacttattagccacatggatctgagcaagttactctttgagactcagaatcctcattcataaaatggagaaaataatagtatgtaactcaccaagctgttctaagaattgaacaagatgatgcagataaggctctctttgcagtgccttcccaaataaaggctcaataattattagtagttatggttagtgttattatagatcattgagaagtctttctttagaagccttttccatcagtacctttttttttcttacttatttctccagccctcttagggcccttgaagaatctcatcaatgatactctcaccagcaccttcaattacctttctcctctgtattttcaccaaaggtattatgccaactctcaccctgtgaatccactgactggggaacattgtttaagaaaatcacatggctgtgccaacaagcaaggtaggaacggccatgtggtgacctgtgggctgaagttaagtgttgtggtttgatcattgtgtaaggtagaatcagagctggatctcaaagaatgttgacttcatttcttcttcctttttttttaattagttgatttgtttggtatatttatttacttatatattttttgctttgggttttggttttgtttgctttaagttttgggaattccttacaggagacacggcacagaagacagaggcagaagcagctttattgaaaaacagagcatgagtagaacgacttcaaatcccatatggcaccacagtgagaagtaacttcctctgagcttcttagagaatccaacaatgtcctgcttccttggggagctgcagccatgggcacatgggaatagggcttccaccaagagtcccgtcagtcacagcaacaggaggtcttcctcagacaactttgatgatagtggttgttagccagagcaagctagaaccagaaagaaaaactatgaagatgccacagtgggagtctgagcaccttgaggcctcctgttggaaactggcaaacctaactgtgggacacttggatgctgagttctggtaaacatgctgtcggaggcacggtaatttagtcattaacatttaaaaacgatctaattctatatacatactctgttgaagacttcttccaaccaccttgtattataaatttaaaatatgaaatacaaactctttatgtgtcttgactcagattacctaggaagggacagtgacctattcatcaatgtttagaattagagtaagttatagaatatagtctgagaaaattacttggaccaagaaagcaatgtccctgacattcatcaatctagaaccagagctgcagattaagctaggtgcaaatttatcagaaaacaatatttttcccaaatacatattgcagccataaaatgccctaaaaacccagttcttagagggactattgcttacttactgagaaattgtattctctgaaatcatagactatgagatgcattgctgtttaaaattattgcaataagaatgaaacatctcactcttatctggaggagttaagtcattgtgatcagtgaagccttgatttaagctcctgtgcaaagcttcagagaatgggtctcaggacacaacatttgacatctattttgacttcatttccaagaaaataggactgctatggtttgaatgtttgtctccctcaaaccaaggtgtcggaggtggggcctaatgggagacgtttgggttatcagggagggtccctcatgaatagattaatgctctccctgggggtagggaacagttagtgagttcttgctttattcattctcaagagagctggttgttaaatagagcctggcgcctccctcctccctccttgctttctctctcaccgtatgatcttagcacattacacctcccctcaccttctgccatgagtggaagcagcctgagcctctcaccaggagcagatgctggtgccatgcttcttgtacagcccacagagcagtgagccaaataaacctcttttccttagagattgcgcagcctcagatgttcctctagagcaacacaaaatggactaagacaagaaccataggtccatttcacagtacagagctgaggttgaccccttttatacacaaccatactttcttagagcccatagaatatcatttcatttacatcacacctaaattccactctttagcaaaatcttatgttaactctatattttcctttgtttgatgagataccccacaattgctctgttgtgcagtccccacactgcaatgagtcagtaaactcaattggtttgtttacaggttgtccctggtggttttaggctgattgggctaagacaaaccacatcttattttttaaatgtctcctttaagcaaatgttattatctgtattttactctattccataagcagaagtgacaaagtagtctaattttaccaaaagatgcttatagcataaaactttctatgctgtaaacatagaaagtacttgaaatcaaaaagaaaaaattactgtccttaaaatgaaaaaaaatatacacacagagttggggttttttcactttactaaagctcaggctgtgcttattacaatagaacagtgatcaaaactacagctttttttcctcctttataatatgaccaaacaagggttagtggcaatgagcactgcatcacttaaaagatactgaaaaacttgaaatactgatgaacctctaacaaacaccttcttcccaatcctcactcttgacctatgaccttgtttccttttcactgagaaacagagaaaaaattagatgagaatgtgtacaagctctcaccacaagatcttcctacctcctctaactgcacctatatactattactatcaaagatccctctgtgtccctaacaaaggctatttcctctccttttgcactaaattccatatactcatgcctatggggagacattgttccagtaattatctcctttcctctgcttgggtcagcctctaggatggacccccatgatccccacctcctggtatccgcgccatgatgcaatctgcttacagcctaaatcaggatgaaccatatgactcatagaacactgcagaaggcatgatgtgtgacttcagatgtgaagtcatagaggacaaggacacagccaccttcttggatttctcactctgtggaagggcagtgacattccatgagacaagcagtcctgtggtgaggcccatgtcaagaaggcctgagatctcccaccatcagctacagccaatttgtcagtcacgtgagtaaaccacctgggacgtgaatcctctcgacttaaccacctcttcaggtggccagagccctagcccaggtctgactgcaacctgatgagaaaccctgagtaggaagacctgcttgagctgctcccaaattattgatccacagacactatgagagataatacgtacttagtgttcttttaacccactacattttggttggctgtatttattaccctgtaacagatgactaatacatctcctgtgatcaaaacacttcagaggttccccatttctctcagagaaatatccaaagtccataaggcctgtgaggcccctcacattcttcccacccccattacctctctaactccattttctaccactctccttctttccacctcaaccacagctacagtgacttctttgccctttctcaaatctgcctcagggcctctgtactggacactctctccccactcccactccctcctccaggccttcactgaaatgtctccctctcagtgaggacttcctttcctaaactgcagtacccccaacctacacacacacacacacacacacacacacacacacacacacacacacagagtctctagtcttcctagctccttaatttttttttccttagcacatatcactatttcatataccatatttgtcatctattttctggtttccctttctcagatgtaagctaagttggtgcaggggtttttgtctgttcccaatgtctagaagagtgtctgatttacagtagacactccatgaaatttgtcaaatgaatacaccagtgttaagagtataagagtgtaatagtacctttaaaaatgcctcaaagataaatcttttgatttatctttatttttagatctctacccccactttagccacttctgaaatttactactagaaaaaccttttctttcgtgaagaactgtctcacaaaaatagcagttaaataggaagctatcctaacccactgtttgccttttcccttgtgaaactcagaccaaaattgaaagtcatctattgtaactatgtgttcttggcatctaaactctgttttgtttcatcttgactttcttaatttcctaggttttttcctttgttcctattattttattgtttttattctatattgcttcaaagactttatgaaattaagtaaattataaatacaaatataaggaagtatactagtcttttcttaagctcacaacaaattattacaggtatctttgattcagtttattataattacagaattgtaaacttttcaaggaataaatctttaaaatcaacaaaggtaatatttttattatttattgggatattcttttttttctttttttttttcttttttttttgagacagagtatcgctttgtcacccaggttggagtgcagtggctcaatctcagctcacctcccagtttcaagcgattctcctgcctcagcctcccaagcagctgggattacaggcgccgccaccacgcttggctaattttttgtatttttagtagacatgcggtttcaccgtgttggtcaggctggtcttgaactcctgacctcaagtgatctacccacctcggcttcccaaactgctgggattacaggcataagccactgtgcccaacctggggtattcttattgtaaaacattttacacgaaaaatatactttgaatcaggagagaaacatttcaacacagcatcattatttctcagtaaaatggcacatttttcctaatttcagattattcttggaaaattttgtttgcttctatgatataataaaattctgcttgaaaattacgtgttaaattgattccttctccatttccaaaaaacagaggaagggttattttaaacaataaagtggttgattatgttatccaatgaatcagcaggttttttactgccttcaccagtcatcatttctcattatacacagagatcctcaaaatgagcagcagatacactcagtctgtaggatcatttagcaactcggggaaggagggtaagtagcctagatttttttaaagttcccacacccaaacatctcaaaagatcataaaaagataaacaagtgttcagagattaaatatggaaaatattggtattggttttgattctatagacaaaaataaaataccacttggcagtagatttctcactttttaagtattcttgtatttggtgaatgggtaaaaagatagtcaaatgagttaaatatacatttaaataaatgggcaaatatgtattatcaattatcagttatcaaccccatcaattatttcatcatatctaaatatatataatatatattcctcggcctgtaaagtaaaccaaccccgtcaataatctcattgtatttaaatatctatttaatatataaatgttctacattaatatatttaatatttaatatgttggtcaatattaaatatgtttaataaagacatatttaataaataataaatatatttatatttcatgtttgtatacaatattaaatatataaatatatatgcaaatatgataagatcatttagggggttggtttccttcaccaggctgagaaaatagtataactgccataaaataatcacaaatttaaaataatgacattttcgcacactattttcagagcagttttagatttatgaaaaaaatcgaggagataggaatagagttctcatataacccctctctactctctcacagttctattagtaacatctgcgtttgagttgtacatttcttacagttgatgaaccaatattggtacattattatgaactaaagtccattgtttacattagagtgcactctgtatgttgtatagctctatgggttctgacacatgcaaaaggccccagatgtagtgtatctaggttaatgttctatacgagcttgagaagaatgcgtattttgctgcagttgaatgagatataactatcaattaaacccaggtgatgatggtactgttcacttctattatattcttactgattttctgcctgttcgatttgccaattactaatagaggaatactgaaaaccccaactgcaataatctatttgtgtctatttctccttgcagttttaccagtttttgccttacctattttgacactctgttgtgaggtgcatacacaggattgttatggcttattggacagctggcccctttatcattatgtaatggccttctttattcctaataatttccttgtctgaagtttgctttgtctgaagttaaaatagttattctagctttcctttgattagtgttagaaaaatatattttgttgggcgtggtggctcatgctgtaatctcagcactttgggaggctgaaggaggaaggtctcttgagttcaggagttcaagaccagcctgggcaacatagtgaaacctcatctctacaaaaaattaaaaattagcttgttgtggtggcacatgcctgcagtcccagctactcaacagactgaggtgggaggatcacttgagctcaggagttcacgactgcagtgtgccatgactgtgccactgtactccagcctgggtgatagagtgagaccctgtttcaaaggttaaaaaaaaaaaaaggaaagaaaagaaaaatataactttctccattccttttgtgtctttataattaacatggatttctggtaaacaacgtagagttgatgcctgtattttattcaatcagtcgttgtcttttaattggtagaccatttatatttagtgatacttgatagagttggattaatatttcccatatattaattgttttctgtttgttgcccttgtaattatttcccttttttgtcctcccctcttcatatggtttggctctgtgcccctacccaaatctcacgtggaattgtaatccccataatccccacctgttgagagagggacttggtgggaggtgattgggtcatgtgggtggttttccccatgctgttctcgtgatagtgagtgagttctcacaagatctcatggttttataaggggctcttcccgctttgcttcctctcacctgctgccatgtacaacatgcctttgcttctccttcgccttctgccatgattctaagcttcctgaggcctccccagccatgcagaactgtgagtcaaacctctttcctttataaattacccagcctcaggtagtatctttatagtagtctgcaaatagactaatatacctcttttgctcccttttctagttttaattgagcattttatatgattctattttctctcctctcttagcatatcaattatacttaaaaatatgtttttagaaattgtcctagagtttgcagtacacatttacaactaagtccacttttcaataacactataccatttcacaggtagtgcaggtactgtataaaagattattcccagtgcctctctcctgttccttaaagcattgctgtcatttatttcatttattcataaactaatatcacccaatatattactgatattattattttgaagttatctatgcgatcaattaagaataagaaacaaattataggttggtggatttttctttcaacactctaaatatttcactctactctctttttccttgcatgttgtctgagaagtctgattaattctcatccttgttccttataagtaaggtgatagtttttcctctgactcctttcaatattttctctttattttccacaatttgtatacaatatgcctacatgtagtttttttaaaatttatcttgcttggtgttatctgatcttcctggatctgtggtttgatgtctgttattaattttagaaagttgtccaccattattagatacctagataactattatttatgtatcttctgctgctttctttcttttccttctggtattgctattacctgtattttatgccttttgtaattttcatacagttcttggaaattgtgtttctttttcctattctgttttctgtttccatttaagtttgggaagtttcaactgacataccttcaagctcactgattcttttgcagctatcaaaagtgattctcttttctattgtagtattttttgttctctaacatttccttttgattctttgagttttcatctttctgtttattcgttcttgcacttttcccagttgatctcttagcatattagtcatagcatattttaaatttccagtctcataattcccaaatccctgccatatctgaatctggttctgaggcttgctttgacatttcagagctgtgttttttcttgccttttagcatgccttataattgttcattgaaagtgaggcatgatgtatcagataatagaaaacaagataagtagacctttagtttttatgtgtattgggccagaagttagactgtgcttaatggttgttgtagctgtaagtatcagaggcttctattttctctaatatctttctttttgtctcccctatttgttgtctttgggttttcctagagactcatttttaagcagagtctgtgtcttgcaactctctctagttgtgatccacagttattataccaaaacactatttatgtggtcgtaagatattggagagttgatacattctataatgttatgataaaatctctatttttaaattcttatttctttttaaacaattttagattcaggaggcacatgtgcaggtttcctacatggatagattctgtaatggtgaggtttgggcttctagtaaacccatcacccaaatagtaaacattacagccaatagataattttcaatctgctctcctctcccacgtttccctgttttggagtccctagcatctattattttacctttatgtccatgtgtacccattgtttagctcccacttataagtgagaacatgcagtacttgattttctgtctgagttatttcacttaggataatggcctctagctccattcatgttgctgcaaaggacatgatttcactcctttttatggctgcataatattccatagtttatatataccacatcttctttatccaatcaactactgatggacacttaggatgattcctaattgtgaatagtaccccaataaatatatgagtgccagtgtcattgattataacaatttcttttccttcaagtagatacccaatagtgggattgctgggccaaatggtacttctattttcagttatttgagaaatccccatactgttttccgtaggggttttactagtttacattgtcattaacagtatatacgcattcccttttctctgtatctttgccaacatctaaaactctgttttctagttgtccagaatccctgagctgtgaacttcataagggtttcttcttttgtttttctccttatgtgagaaagaaagtgtagaaggtgttcaaactgtctagttgccttttctctaattcagataaagctctggggtaaagtttaccttgaggacaggcttttgtttctgagtatatttcaaatagttattgttttcctcccacatgccagaaaaaagaggaaacttttgtcctgtcttctgaaagtaaaattcattaatgtgtggatgctcccatatgaatgactcccactgtctctgagttttcaactctcaagttagtccacactcagccttcagcaataggccaaatactgtataaatgcccccctatcctttactggctccagtggcttttgctgtcctgataagctgtaattctccgtattcacctatttcttcagtttgcaaagaggtggcatgtcctatgacatcaattctctgcagatctaaaaagagtagttgatttttgatttgctcatttttttcttgttgtgatgatggaagtggagactttcacacctttcaaatgtcagagcagaaaccagaagtcctagtaataatgttatatatatatatctcttttgaccacataaaagggggaggtgcacaggtcttattattatcattttacatataagaaaactaaggtttaaagagattaaatgagtttccatgagaaatattgctaacagacgaagctaaagtcagaacctggatcttctagtgtctgccaggactctcccaatacagaccattctgtttaggcattcatgtatacgaaacaatttgaaagaaaaattttagtttaagaatagagtcatgcatgtttggatttgctctgtggcataatgtaaaaggcaatggcctagcatatccctaatgaatcttctcaggcctaattcagcccccaactcacttttagactttagaaattctcagcaaatgctgacacaagcttcagtttctccatgtgagtgaagcaagaataaaccacatgatcttgtgaccatgaagtgaaacaattctaggttggatttaggccctatatttttggaagcaagtttgtgtatgtgtgtgtgtcttaggtgtgcatgtgtggaaaggggaactgatttcttcaaaatctttctgaactgctaaattaatcctcttccttaagtgaaaaagctttgctgctttaattctttaaatgaaatgttattttgccttcccatctgctcatctgacatgatagtctatggatgtgattaatgtttaaggcagaacttccttctaggaaatgtcatattttaacagtccttgtgttttctccttcctgtgaatgctacacccattaccaaccactggatggtctcgggttaaatagcacttcctcagagaaggcttctttgaactcagactagcacagaacctacacttcccctttccaacttaaagtttgcatcctttggtgtatgcgaacccacatgaagagatgttttttttgttttgttttttttttgagaggactccctcactttgggagggcgaggcgggcggatcacctgaggtcaggagatcgagaccatcctggctaacacggtgaaaccccgtctctactaaaaatacaaaaaaattagccaggtgtggtggtgggtgcctgtagtcccagctactcaggaggctgaggcaggagaatcgcttgaacccaggaggcggaggttgcagggagccgagattgcaccactgcactccagcttggacgagagcgagactccgtcttaaaaaaaaaaatacagataaatggcctgtacagataaatggcttaggtgcatctacaaagaattagtgattacaagtgaaatcttgtaatgtcacaagaaatgttaatgacgtcagtggtgcagatgaatttcttaataccaagtggaaaaattcacttgagataatcttttacaatggtgtgaaattcctcagacttttgttttatccataaactgcacaaataatacctccctctgtgacacttagagagggtgacatgctgagagtttcctgaataatcacctcttgaaatacacaaaactcttctagtttcctggttgaccgacccagggcttgacgactccttttgagccacctgacaattcagtccagcacagcaactgaaggaaggcgttccccaacctgctgtcctatgaaggcctctaggtcaccggtgctaaagccctcctttctccaccctccttaagtggaggtaaacgtcccagcaggaagtcaaggctggattggcgctcttcgcgagcaccctgggaacgggagtctgggtcacgggtgctagagccctcccctctcctcccggccggtgtatgggaaattgtccccgcagaaagtaaaggctggccaggccgcccccagcacgtagagggaatgagtcaggctccggctccacactggcacgtagtgggcggatcgcgccggcgctgagtaggaaggagcttcagccgccagcccggaacgcagtgagtacagccactcaaaggaaagccaagtcgctttgcaggggagcgtctcatgatttttcagaaacgtgctcatggttaaaaagaaaaatcaaggctcggaataaatacattcaagcactgttaattttagcccaaagacaggcggtacttgcctggagatttgggaaaatcaacatgaaactaaaaatgaaattttagttggagtggagcaagcagtattgatcagaacataccaaatacgaattttttcaaagtctgcgtagaagtttaaattactaggaaaaatgtaaaggagaagtatttactaataaatgaaacaaaagtaataaaataaaaatgaattaatatagtttgacaaaatatcagcgaacgctgaaaagaaaacattaaaataatgtttgagactttttaggttttgtgcaggaagaattgggaaaaatgtgctggatggagtgatactgcttttcttttccacaaaaatttcattattttagagagcggtagagcctttttaaagacagtaagttattgccaattcacaatgaaataagatcacatgctctgaaatgtacaagagctgcatgcaataaacttcatttatctataggtaataactgattgatgtttattcagtagtcgaaatgcacctcatgcactctaattagcacgtcaaattagtctctccgtttcagaggtgtagggcctttgtggagccttctcaataaaataatttgccactcttgaaggttagacattctcttctatcaatgtacacataaaggttttgttttgctttgcttgttgtgaattaaaatggggagaaaatgatgtgttagctatcacccagtcatgtgtctttttagtcataggttagcttttcaagacacttcctgcatctctgacctgttgcacctctgttatcttggcacctctgttatcttagcagcaagcacctgcctcagctgacccttgagccataacccatgtaagtcactgcagggctgaacctctctttgagcctaacagtagaataataattatttttattgaatagtgttaatgtgtcaatgttgaaatgtgcctcagtgtgtcttcctcaaccacatccctatagaggatgttttcttaatagcaatgtgtttttgttttaagaaagtccacacaatttcaaatacacattttctttactaaagtttattgaccagttttgaagtgatccttgttttcagttaaactatctttaataatggtaaataacatattttgtaggttgttgtatatttaatattctctgcaagaacacataaggaacaatacatggacctttaaatatttgtcattgtgaaataaaataacaaggaaaggtgatttcaggtgtactttattcaatacatatatacaagaagttattactataacattaaatttgcaggaaaaaagaaaccactggattattctgcttctattccagagggcttattccaaagggccagtgtgcaaaatatgaatccaagatggcattgtggaaagacgctgtacctcctgtgataaaattactttggtggtgcttttttctcatgtatctcgggaaactaaaaatctgaattgtattcagtggccttttccaaatggtaactttatgaaaaaatgtctaattcttggttatttgtggttttagtcctttcttcatagagaagctaaagctgttaaataagcttagcagcgttatccgctaaaactttctgcagtgatggaacctacacaggagaattttttttgtaatgtactaaaaatttgtcttcagggcttgttctttttaaattgtaggctagtgatcaaaaatatttggtgatagaataaattaacatgaagtacaaacattatatatagttgtgtaatatcctatctgcaaaaaggagtcttagcgtgcttttgaaaaattcaataaatataatatgttaatcacaatttggtcacagattcacgtctcaattgtttcattttttcttttatttcagaagctcctgaaaagtacatcaagtctaaagtgaaccagctaactcattaagactggaatcatgagcaacaatggagcagacctaacctttggttacatctcctgttttgtagctatccttttgtttggctcaaattttgtgccacttaaaaaatttgatactggtgatggtaattatttttccttgattgttaacgttatattatttttaaaaatgaagttccttttttggtcttttaaaagtatagctacaaaaataaatcatgttgatcttgatacctagtgaatagagcttaaaattagtcatttgacagtgctcataccagtttgtctgaaagtcagaataggagaaccattaaggttgtttcatggtaaagttagggagggtacagtcaggaaatctcttgggccattatatgaatggaagaaatttatagtcagttctactataacacctgttttgaaaacatgaatcttcaacatgattgatatattagagaacaatgtaagcataacagatttttggcttgcttatgtgcaattttgtccctgagaaacctctagataggcacagaagactgcacctagatgaataaagatgtgtgataatacacataatgcacgcagacacacgtacaatcttcaaatatcgaccagctcccttagttcatcacatgtggttatgatgtattccacccaaccacatctcctgtcccaactcctcacccaataccttcacagtaactcgtaagctgcaaccctttggatgctcacttccaggagcaaacttctggtgtttttcaattaaaatgccctatttattacagcatcatgtaattaaccagttaaccagttaaaactgtactactattttaattaggttgagtgttgttctcctagccccattttcccattatgctctgtagtttttactgcatgattttgcatagtgcagtgatttcaaggaatgcacatgttacattatagcagaactgactaatgtgaattttggggaaggagaagcaagagttatttgtatttgcctgacttccatattaaagccaggagaaggaattgagatttatggtgaacacatgttgggaattacttccttggtagtatttatcacctgacagcagttgtgttatttccccaattctttgtcttcgtgcacttagaaaataggattacctcctattttcctccagggcctttcttctcttttcctctggagttaggacaagaatgggaactacccgaagaacaaaaaaatgggtagaggatctagcttttttagtcttccacaattagctttgtgatcctgggcaaatattaccagctctgctgttttcagtttctcatttgtaaagtgaacaacttataaaatgaagtttcttttcatctctgtgattctactctttttattttttatttttcatttttttggggagatagagtctcactctttcaccgaggatggagtgaagtatcataatcttggctcacagcaacctccacctttagggttcaagtgattctcatgtctcagcctgccaagtagctggaactacaggcacacactaccacacccggctaatttcttatatttatggtagagacggaatctcaagggctggtctcgaactcctgagctcaggcagtccacctactttggcctcccaaagtgctaggattacaggcctaagccaccacgcctggctgattctactcttttgtcatggagattagcagccatcttttctctctcctccatcatgagattgaatccaagaggggcaacaatcttccaaagttagtgccagaagtaatacattgagttttaactgcctcagtatttctttcaatgtcaactatttcctcatccttttaatctctaaatccttaatgatgcagaagcctcaaaaaggtacagatacacctcatcaccaggttatcttcagataactggaaaatggcaactcaaagtatagaaagcagagtaaccttgacctagatagctaattctcaggtttataatgcccgactcatcataggcattgaactctaactgtatgaggcctatgtgtgaccataaatggctttatttttatcccagaggtggcataaatggtccctgaaggtttactgttgtgctattccgaagcacttactgccatattttgggaagcaagagtactcagtgtggcatctgaatgagaatatacactcggtcttgccatcactcttgggcagaaaattcttgatttgtctaataggaggaaaaaaagaatgttaagccagagcacaccgtgtctaagccttggagtcaacctgggtttaaattccagctcaacaaactactagctgtttggacaggttgcttaattgaagattcattttctctatctttgagctagggttaattatgttgcagagtagtcataagaatgaaatgtgcaaagtccatggcatatggcatttaataaattgtggccattcctgtaatatcacctcatagatattcctgagcacaaatttactcaattcaatttgaaccactaacactgagtttgtttatttctaggaatgtttctccagtgggttctttgtgctgccatatggttggttgccttggttgtcaatctgatattacattgtccaaagttttggccttttgcaatgcttgggggctgcatttgggcaacaggtaatgtctgatataacttatacttttattatgtaacataatgataaaaataattctcgttcacaataggaggaaatagcgcaaacagtgattctgaataacccttagtcatagatactagaaattaactagtttcttgccttcacatgctcaatgaatatttttggtgccttacctgatttgttccacctgatttattcctcttaatgatttatttttaagttcctggtagaaaattattatagtaaaaacattttaattattctccatctattcaagcatagctcatatattattttaatgtgttctggcccttttttctagcatgtttatcagaaaatatttattaaatagtaatctctactaataaaatttttaggacttaacctaattaggccaatgtgaagatactatcatttcaaaagggctggttaacagaaaagcaaagcaaacaaaaatcttcctgttgccttatcagtacctgaaattatataattagaattcataccttggcttggccaatcaagaaatgtttcccttcaattaatataaatacaccccaggaggtctttttttcttcaacaaagagaattccaagtatcagtgatctttagaaataatttgcattaaaagcaaataaatgttaaaatgttaaaactttattaaaaaaattaaaatgaaaatttatttattacccacttaatttgagtctctgaggagttaaatgatttagtgaagttcataagttagaagataaaagaattcgcttttaaattcccaccaggatttacattattatacctcacttatacctcagtatgattgcttgtcatatctaacagggggagaggaacagactaagcatccatccatcctgcagctctttatagccaccagagcatttctgttcacccagcaggttccactgggtgtcagtggggaaagagtccaatttgagatatgttgcagatgtggatgctataggttggagcaactgatagcatataggacatagcagaatgggaggagccaatgataatgtagagatttgattataggtgattaggagggtggtggtattgacacatatgtggaaataggaaaaagaacatgtttgaaagagaaaatgatgggttcagcttggcactttctgagcatgaacatcccgatgtttctaccatagagaacatctggttggagatttcttcttgatggtttggagaataatattaaaaccctaaagtaggtccaggttagaactgtagcactgggaacacgcacctttagctggtagctgaaatcatgaaattaggtcaagtacccaaaggacaataaagcaaggggacaaatatgttcaagggaaaatctttagggggtaccttattccagaaggaatgatgaaaaatagtagccagagaaagagctaaagagaaaaacaggaggagactcaagagatgaagacatcatggaatcctaaagaggtaaccttttaagaagagactgtaggacttgagacaaaaaaaaaaaaattatgtatttggccctcagtgaccctcaaaacataagagaatgaatgtagaaatccagaagacaaatcagcaatcatggaagagcaaattctgggcctgttttatggccaagtacttctgccagtatttggccctaattcaagtctaagaggatggtcactgataatttatcactgacagcttccatgaagaatcacagaatagagagctatgctaagggagagaaacctctgtacaattaggaattcaacacttttctttgtagacttttttcctaagcctagttcttttagcacacatactcataaatttaatgccaaaaatgtggttattttactgaaaaaataaggaactgtgctttactaaatttgtccaaatcacatgcacttcagttgaagttagaataaaaactaattctatttataaatgtattttctatatggaaataacatgtttcttctgtatattacatctacagggaacattgctgttgtcccaattatcaaaaccattggtttaggccttggaatcttaatctggggatcatttaatgccttaactggctgggcaagctcaaggtaattcaagtcaaactagttcaactaagatttcctgcatccatattctatgtaaagcaagtgattaccgagaggaataacatatgattcttattctcacagagtttatagctggtaaaacatacacatcatatatgccaccttctattgctatttgccctaaattcttaataagtgatctagatatttgatcaagatatagtgtagcattaaatctgggaaacagaggtagagagagaaaaaggaaactgatgtttattgtccctttctattgtgtgacaatttgctggacatgttctatgcatcattctcatctcactttcacaaatacgtgaggtaagcactatcttataagagagtagataaaaagagattaagtaacttactgtaggtcacagaactaagaagctaggattcaaacccaggtcttctagttccagagcacatattctttcctctagagcagggttggcaaagcacggtctggtttcccagccatttctataaataacgttttatcagaacacagccaaacccatccatttaaggattgtctatggctatttttatgttacagtggcagagttgagcagcaagggaataactgacccacaaagcctaaattatctacaaccgccttcgagaaaaagtttgccagtcccagctctagcgttgtgttgtccaatagtgtagccagaagccacaggaggccatttatatttaaatttaaattaattaaaagttgataaaattaaacctccagttttttggttgcactagccacatttgatgtgctcagtagctaatatggggagaggctactcttttgtgcagtgaagatagagaacagtcccatcattacacaaagttctatcagactggtgcccttggtcagcattaagattaacattcaaatcaattttgggaaaatgagtggaatgtggggtgttattctcactttaccttttggactccctttccactcaaagcattataaccacctcaaaacaacaaaacaaaccaacttactaacttccaatacattctctcccatccttcccccattccccacctcctgctattttctttttcttttccttcttttctcctttcctcttgcccctggatggttctcagtgattcttggtaatgatcacggcaatgtcaggcaggaaaaaaaaattgtggtgatgacagagtagggatatttaacctagaaattttttaaaagtctactccaaatattatacaatattgtaaccaattaattaaccttccatgagtcaggtgaactactttttcctacttcttttttagtcttaggaaagagacactcacaagtacttttatgtatactaactcatttaatctttgtaacaaacttataaggtaggtataattattatcccattttaaacatgggaggctgggcacgttggctaacgcctataatctcagcactttgggagatcgaggtgggtggatcgcttgatttcaggaattcaagaccagtgaaaccctgtctctactaaaaatacaaaaattagccaggcgtggtaacaggcacctgtagtcccagctacttgggaggctgaggcaggagaataggttgaattcaggaggcagaggttgcagtgagccaagatcataccactgtactccagcctggatgacagagcaagcctccatctcaaaaaaaaatttttttttaatttaaaaaaattggaaattgaggcacagtgaagataattaactttcccaaagtcacagctaataagtgagagagctagcatttgaacccaggaatctggcccctagtccatgcccttaaacattatggtgaaacatcttaacaatatttaatttgatgtgactttctggattttcaggtttggctggtttggattggatgcagaagaagtatcaaatccgctgctaaattacattggagctgggctatcagtagtaaggtacacagtcatttctagtgattttgctgttcttcaaaacatggagagtgcttttttaaggatcctgctatgtttacattttttaaacctacatttcgtaaaatccacatgcttgttcctcagattcttcatttacaatgactggttttagaggacaaaaagtgccagatttgggggcaggggcagccccagctttagctctccaaaactctgagagcctggaaaatcatttaactgctcttaagcttagttttatcatctataatatgtagaaaatcataacacatagcttatcaatgagaatcatatattttgcaaactaaaacatgctattcagaaaaagcattctgctggcttcctgatgcccctggagtagtcactgattctctcttctatgtactactcacttcctatctcacctagtttccacttcccctgtctcctcactcactcttctcaacctagctagacagctcctctttcacctgtgagaacacatactcttttgaatgcccatgtttggttgcatctgtgtctagctgtatgcactctacgaataagggtgaaaatgactttgaatctctgtatggcagtgttcagtccataaaacttaacaggaactgggtcaccttaaattcagtcttctttcccctctggattccatttatattccctgtcagttcttcacataatggatagtactgcctagaaagattttagtacttttttattcttagggaaagaacagtatatttgccttccttcagcaatgatggcttttccccaggcacattcaggaacaatctctttgtcattgaaatgttgccttagagagtagtcccaggccaattggagaaaaagataacataaattattctaaaatagcagattcctgactttttttggttagaggcaattttatgtattttgtataattcacacagaattctagctctgaatagctctctcaaaaacaatttctttacacaccaaaattgtaacataggatggcttagttttgacttaatgacaattgaaggccagtttacccagtctatcaggcattgttttcctccatatttcttctttatttagaaaaagtacattctctaaaattgcaaatcaattattcatgttctaccacttccacctatgtggccatgggcaaataacttcagttctccaagctttggtttcttcatttgtagagggataataatagcaccaacctcataaagtattttgagggttaaatgaaataaaatatgtttagtgcttcatatagtgctaattacatggttaatgctctacatattagttgccattacaattattttattaataacatttatgttcaattactgtttccctgttgggtatttgttgcccaactttatgttacagtaggcagtgcacctgaggaaccctgtagctcaatttgaacttggtctgtagcagggaaattcaagaactcttcccgtagtgcatctaggctcccttctatgtttctctgctaagaggaatttctggaatatgtcatttcattattttaactcagttaaatcagtttgttctgaagggtattcactgaataaacttggagcttcatggtccatgtttcatgcacttgaaatagggttgcattcgtttaggatattgcttttctttttaaaattaaaattattgcttctatcctctgtatagtctaatttttaaaggttggttaatttctagtcttacattttctttatatgatatacaaagtgtctatcagtctgtatacaaaacctctccaggtattttaaacaggagaggatttaacacaggaaattgtttgcaagacccagttgagcaaaagaaggaaggttgtgtcacccataaccctgaagcccacacaatactgctgaattgcctctgcctgaccgactgctcctgctgaaactactggaggcaccaccaaaacataatgtcttctcccatcttctcaaatgatgcaagtgcctccccctggcagaacctagctgccaataaagtttgggaaatgtaattttcagtcttccatgctccatggttcaggagagagtatgtaagggtgagagcagagctgacaccaagaaacaatattcagaacactctgttaaacatttgctttcttgaagatccagaagccagaggtctataacaagacagatgtccttttcaattcaaataataatatgatttggattatctttaaggacatgctctcccttcttttgtcttctcatttaacatgcctttcctggagggttatgtttactccacagcttcatctattattttaccttgtgaggaaacccaaatcatggtttctagctgtcacctttcctcaagccacagcccttatttctaactatggaccaaactacacatctctacacatactccacaggtacctcctttcagtcttatctgagataacacacagaagggaatgatgctgatcagcactttgccaacactaaaccatttgttcctttctctttgccttcaacatttcccaatcagaattacttttcttactggacccttccctgcaaactggttcctcttcctgagttctctctctccatagaaggccacagtcattcaaattcaaaacctgtcatctttatttttttccctttatatgctatgactattcctgtaaaaaaaattttgaatgtttcacaagttcttcctctgctttccctcgtcccatcctacctacccacttgtatacatgtgattgtaaaaaatctcacatctagtttccctggttccattcttcccttttgccagtatggatagttgatatctgccctacatcagggcatgtcattgtcctgtttaaaaacctttgaatgttccccactgaattcagaataaacttgtctccttaatctggcttgtcccttacagtacatctattcagccagtgtttctacacgtttcacctttctccctgtattgtgcattcattgacccaggattacaccacactccagacatctccctcagccttgaaagccttttcctcagcctccttggccatcatttaatatcatttgagattgttccatcccatgtgatgttttcttgattttcttctctctagttagactcttcccctaaactaccaaaactttttgtgcttcttccattattgaaactatcagagtctactttgtattacttatacagtcctctttattcctgaactatgatttcctgaaggacaaggcccattattttctatatacaccattcctcccaccatcaccatcaaactttcatatatagtgttttacacataattgatgcttagtaaatgtttgttgacttcagttgtcggcgtaactgcacgtgcacacacacaatttttactaagtgtgtgatgtacgggattgcaaatctagggaagctggaaagcttgaaaatgtaaagaagaatcattgggtaaaacatcaagtttccttttaaattacctatgcctttgacggcattcatagactttatcatggaactttgtatttgatgtactgcaccaagttattttaagtctgtagcccaaaacaccttgtgatttatttggttttatgttcatatacataaaataaatttgatcaccttctccttacttactgccacccactcccttgatctaactgactgggactcttctttctgatttacctattcttatgactagcattagttgcacaggctcaaaatcattgtgtattcctaatttctttttcatgctcagcaccccgtcacctatccatttggtaattaaggctttctctttactaacatgttttcagattttattttgtgccagaagtacactgagaattgtgtatgcattctcatttgattttcaccacagctctgtgatgagtgtatatccccattttttagttgaaaactgtcaagtctcagggagtgatttgttggagggttgtacacctgtttgaagtaaaacaatcaagagccttatctatagtgtccttttatttatttattcatttattttttttactttaagttccaggatacatgtgcagaacgtgcaggattgttacataggtacatgtgtaccatggtggtttgctgcacctattgacccatcctttaagttccctccccttgcccaccaccctccaacaggccgtggtgtgtgttgttcccctccctgtgtccacgtattctcactgtttaactccaacttatgagtgagaacatgcagtgtttggttttctgttcctatgttagtttgctgaggatgatggcttccagcctcatccatgtctctgcaaaggacatgacctcattcctctttatggctgcaaagtattccatggtgtatatgtaccacactttctttatccagtctatcattgatgggcatttgggttggtttcatgactttgctattgtaaatagtgctgcaataagcatacatgtgcatgtgtctttataatagaatgatttatattcctttgggtatatacccagtaatgggattgctgggtcaaatggtatttctggttctagatccttgaggaatcaccatactgtcttccacaatggttgaactaatttatattccaccaacagtgtaaaagcattcctatttctccacagcttcgccagcatctattgtttctcttttttttaataatcgccattctgactggcctgagatggtatctcattgtggttttgatttgcatttctctaatgatcagtgatgttgagcttttttcatgtttgttggtcatgcaaatgtcttctttggggaagtgtctgttcatatcctttgcccactttttgatggagttgtttgttttcctcttgtaaatttgtttaagttccttgtaaattctggatattaaacctttgtcagacaggcagattgcaaaaaatttctcccattctgtaggttgcctgttcactctgatgatagtttcttttgctgtgcagaagctctttagtttaattagatcccacttatgagatctttaatcttattttaaaaactgtggtcatgggaggctcagatgagtcataaaacacatcaggttggtcatttcctgggctacataccttgtatagaataacattatacaaataagtttttttagagttctcgtacacttataataaccgtaaaataataggaccgtagcaacctttcatcctacctcagtgacttgatgtatacactgggaacagccttcggtctgaggaaggtcagttgaagtccttactatacaagtccaaattttaaggaaaatgagttctgcgatgagtttcctcatgcttcggccatgcgtggaccagtcagcttctgggtgtgactggagcagggcttgtcgtcttcttcagagtcactttgcaggggttggcgaagctgctctcatccacgtacagctcccagtctactgatgtttaagggtggtctcagaggttgggcctattagaataaactgagtctaatacctctacacagttatgttcaactgggctctctaataccgagagcaaggtggcagggtcagggtgttgtaaacttcaatggttatgcagggattttcacagagcaagctttgatatctagttagtctagcattcattggctagtaatgtcctttggtatttattaaagtcaccacagcatggggggactttatgtttaggttttgcctaagagttagcttatctgcttcttgtgctaacagggccattgctgctaacgcccttagacatgggggccagcctttggaaaccctgtctagttgttttttttagagataggccactggcccttggccagggccctacagtctgggttaaaactccaactgccattttttttctgacacgtagggtgtaaagggttttgtcagctcagttagccccagggctggggctgacatgagtttttcttttaactcatgaaaagcttgttgctgttggttgtaatagatgtagtttatctaaactacatttttattaactgtcacccactaaaatattgacttaaatcctgtagctatttgattttaagctttaaattgatctggtattccttgtggggccccaattgcatctaaatagatacgagagttgaaagacctataaggggcttctctcactttacgatgtcttatttttttctccttctggttgatgaaatgccagggtgaaagggatagccaaatggactaaagcacaagtgccatgctagttattcggcagagtgcccagtaaaggtccacgacaataccaccacacatccgttcagggatgaacaagggctgactgattgataagctcttgaaaattcttaaactcatcacatcctttcaggtctctaaggaatgctgtttcctccctgtcgtgagagacacgaagtgaatttagtgttgggagatggaagctggatggccctcgggggctgacccgcagggtgccggacttcgggatatagcagagagagcttggcatgacttattactccaggctatagaatcctggaaaagagctaccatgcagcctatgcctggtcgactggaggaccaccttagtggagcgggggacaatctgggcctctggcctgccatgtgcacaagcataacaattgcttttgtttaacgtgcagatggaatatttgatccattttaaccaggcatttgcatcttggtatcctgtcttaattgctaaagtttgttttaagtctttaacttctatgatcctctagtaaaatgaatgtatgatttttataccagataagctaaattttacctttatattagtgtgttattaatgttaaacttaattttaataaaatcttgtagacatatttatccaatttttaatgtttgagcataaggtaagattttatagactctttttaatcttttataatttttgctaaagagcaggttggtgatttaggaaaagcctgctatgcttttattttaatggccagtttacagaaaaactgcatgatacctctttaactttagccaatgtttacacatggaattttctttctaattaacattttaaaacttgattaaacctttaaaacaaaatatacatatttttaaccttttaatgtaggtaaaaatttatatttttatgccttcttataattcttttatcaaaagtatattttattttctttatacaccttgcacataaactgttttgttttgtttttgtttttgttttacattcaggaggcctagctacttttaaattatacaacatttcttgcataaattcttttttataacatttttataacattttttctctttcacaactttcgccgacaattctttgacatgctttaactttctgacttattacaaatatttttttctttaaacaaccagttaatttatttcagggcaagaatttaccatataatactctttttacataaatcccgccccccctttttttcttttctttttcttttgaagatgataactattctttctaaagcgaacttcttttatgtctgtgggctaggctgtctgaggccacaagaatagaagttagtataatacatgttacactgttaacttttagcaaactttacttttgttgaaaaccttgtaagtttgggattttaattatcctttgctattaataagaccttgttttgtccaaattaatttagaattggtatagatggcttttttttttttttcctaacggaatagcctcataccttaagatttttgagttagtaagctgcttttttgcttttttgatttaggatacttctgaactgaactagtgaggtgtgctcacgatgaggtttcctctaaaagttatttttgttttattttttttctgttaacaaagcagttgccgctacagactgaatgcatttgggccatccacgggttactgggttaaggatttttgataggaaggcctcagtgctttcaggatacgccattgtttacactgacaatgaagtggtattggagcattatagggttacagagaatactttcaattatcaattacaggttttaaatttactttggcttttaaaggaataaggtacactgttttttttcttaactacttatatatatatctctctttctctctttctttatctctttgactttgtctctctctgactttccttttgcctctgtctcttcctctctctcttctcgcttattctgcagttctctcaaccactgtggagagctctaaaaccagctctccaagcgtatatgtatagaaccagtaaccaaacgtctatgtacagaaactggtctgggtgccctggctttacaggttaccttgggccatacctttgaaacaagagacctgtccaggcttctttctgatggccaacttaccttcaatgctggccagtctactttacacaaagttttaagttttcctggtgtcatagtactccatagtctcctttaaatcctttcttgaaatttttcaatgtatttcctagtagggtcagcttatctgtgcctgacccatgcttcttcgaggcaaaacaccatgctcacaccacacacacaccacaaagcaaagaacgggtaaaaaggcacacacacacttttgcagtttacaccaaaccaaaatcaaaaccaaaatcagagtatccagaaatccaagccaggtcaaaaccaaaaccaaagtatcaagcaatccaagtcaagtcaaaaagaaaaaccaaagtgccagtacaggcacaccgtgggtgatcaggccacgcttccactcaaatggagtaggcaagttcccaagaccagtcctgtcaagtaatcaaaccaagtcaaaaccaaaaccaaaatcaaagtgccgataaaggcatgccatgggtgatcaggccacgcttccactcaaatggagtgggcaagttcccaagactggtgctgtcaagcaattcaaaccaagtcaaaaccaaaaccaaaactaaatcaaagtgccgataagggcacgccatgggtgatcaggccacgcttccactcaaatggatggagtaggcaagttacaaagactagtcttaccaagtttcagatgtctggactccaagtaccagttccttcccagtattcagccactgcgtcgatcctccacaggggcctgccacacactgctctggtgaggcatcccaccggggcaaatgcctacccgggagcgctctcaggatccatgtcgcttgggctggtcggagtccctcgcagggatgttccacagggcaggcttaagccgcctaaggagctgcatcgaccatctgccaatcacctctcttcccggtcagggaaccaagaaatgtagcaggaggagccgcagacaaaactcctcagacacggagttaaagaaggaagtggtttattcggccaggagcatcgggcaagactcctgtcttaagagccaagctccccaagtgagcaattcctgtcccttttaagggctcacaactctaaaggggtccgcgtgagagggtcgtgatggattgagcaagcagggggtagttgactgggggctgcatgcaccggtaatcagaacgaaacagaacaggacagggatttttacagagcctttccatacaatgtctggaatctataggtaacataaccggttaggccattggtcgatctttaactaccaggcttaggtcaggcaagcccaggcctggtttcaggtctggttccttggttttgggtctggttcctaggcgccgggctacctgcctttagtttcgcttctcttcccttttctgagtataaaacaatatgaaaaggtctgtctctcttctctcaaggtcactcttctgtagggctgctgtggtttgctgggggtacacttcagggcctattcatctggtttgctcccgcgcttagagatgttactcaaggaggctgaagaacagcaaagatggatgccttcttcttcatctgggatctcggaccccaagaggcaccaacctgatgccagtaggatcattcctgtacagggtgcctgacaaaccctgttagaggatctcacccagttgggtggcatggggaacaggacccatttaaggcagcactttgactgtcccttttggagggggtgagcttcgctggggggaaaaccatttatctggtctatccagattcctcagaactactggaggaaaggctaactctgctggtctgcagagactatggccaaccctcccactaagggaggcccagggaggctagggttctgtccctgagactcaggctagagttgttggagttcctgcagggaggccccgcccagtgagaaaggatgggtcagggtcaggcctgaagaggtgctctggccacattctgccacagacagtgtgttgggctttagggaacacttcttggggatcaagctctccagcctccctggctccggcagtggaaaagcatggcctggagctatagagctggatgctacccttccctcacccagggagcttagcgtgttagatggtaatgagtcccagtgctggctgctgccccttccccaaggagctcagatggcttaggcagcaggcagctgcagctgtggtactggtcacccctcccttcgggagctcagcaggctgaggcagattccagcggagaggctgttgagaatctgcatggctctagtgttgggaccctaggccccagtggcgtaggtttgcaagtgggatcttccaatctgtaggttgcaagttctgtggaaaaagcatggtttccccagctgggtagcatgctcactcaccaattcccttggctggggtgtgggggtcctgcagccctgtgtggctctcaggtgggccactagaccacactgcttttccttcctgaccgttattatgtcagccacctagtcagttctgatgagagaatctggataccttggttgccagtgaaggagtcacacactaattatcattctttttgatgtgagcctctgattgctgctgttactagttgtccatcttggtcccacccatcctatctgtagctttcaagtgttttctaacatatcattctgtattgtttattagaaaaacacacaggtctatacagagtagaggattttcgttgtataattttgagaacaaaatgccaattgatgtctaatattaaccttacaaatatatatatatatatgcacacacagaaatacatatttacacaaatatgtgtgtgtaaatatatatataatatatataaaacacacatatatgtaactcatatatattaggctttatgcattcaattttactacatgttaaatatcttgaggaccctgaaggagatataagatgtggtttctactgtaggggtggaaaggtgtgataactttcttccctatcataagggtcatggctgacactcctataataaaagacaggttgacaagacaaaaacataacaaatttaatcaaagttctgcatgacatgggaacctgaagacccaaagacccagggaaaaaacatctgtttttctgcttagatttgaagatttgacagccatgtagaaatgtaattacacaaagggtatgatctaatggtaatagactgaggggagaaacatagcaaaacccgcctgttcggattcttcttggtctctttgtatagtatttcttcttctttgatatacagcaggacccctctggaatgagggtcttatgatctagacaaggtaggtcagagaatttctttatagccagctcctacacagaacgtggagggttgggggttgttggagtaactgatctaggtttcatggctggttttgaggaagagggattctagtgtccataactcatctttgagaagaggaattctaatttctgtggcctgctttgtgggagaaaggtgagtggaagccatcaaggcatgaggaagtcaaagagagactttccttctgaggctgcttctgaggccttccaatctcctatagttcaaagtactcagcacgccgaagtgccgtaatttggggtatcattttctgaccccaacattggcttttattgaattagaaaatctttagagaaaaaaagattacattgtggcaaatggtctagattgtgtggtaactattcttagtgttgtggggattcaaagaggaagattcagtgaggactggcccaaggggaagtttttttttaaaccacattcaacacttcaactcttctttagtttggacaggacaaagagtatctagggtgtccagctagggaagaaagagaagcaagtgcaagtcgttgtgaaaaattggggaggggggttggtagacagcttggagcagggagtggtcaggcatagaagccaatacgaggatttatgttgagataggttggatggaacataatgcagagagccataaaaatcaaaaaggaaagttaaatctcatatggaaaggaatatgaaactattcatgttttaaagcaagtaagagattgaacaaagaaacctaactagagcattttaatttttacacaaaagacagcatatgatagacactcttctgtacctagctacctaccctatttcagtgtcatatatgctttgaaagcttcttattttgtttgaaatgttgaaccatgcaaatgtattttaaaagtatttcaaaagagatgttaaaagtatcccaacgttgttcattttctcaagttaatttaatcttttgacacattttaacaaatttgcatggcttaaaagccaagagtaagtgaggcatttgttgcaaagatacaggacatcaatagtgtattatgagagagatgttaaagggaaaaatgtcactagatttaaatgtatgtttttatctcttaaactatatcctggagatcttcccatatcagagcatagagatcatcattattccatttttacagctgcatagtattccattgcatgaccatgtaggccacctcacctgagtttgagtgtacctgtgtgagtgggcctccggcaggattggtaaggtcagaagtggacacaccggtggcctcagtagatcaccccagattctcctctgtgtgagttatacagttctgcacttctatcagcagtatctgagagtatctgtcccctagcgtttgtccaactgaggatgttcaacttttgaagttggtcgatataatagctaagaaatattatttcaatgtagttttcatttgtgtttcttttacaatgtgatttcaaagttaagggaaatatctgatgtagaaggaaagcttatgagtttagcctttagcctgttgtaattaaggaaaatgagaaacatctaagagaataggagttctggcaaaacggcaggaccactgaaggggcaatttgaaagtaatcattgtatcattaggatccgattatttaaggtgtgtgtttttttcttaaaaatcaagcagcttgatataaaccagtattatgataaatatcactaaaatttattttccttacagtgctttcatatttttgttcatcaaaagtgaaataccaaataacacgtgttccatggataccactccattaataacagagcatgtgagtatagtatgagagacaacttgatttgaaacataaaattaagataaatggataatacataaattttaaacacagatgaaaaagtggtgtttgctcatcactcctggctatgtaaaatatcttagcttatttattatgggtaggtctatgtagcaatcaatcaatatttccgcagttgagcttctcagcaagcacacgggtttatttattttgattaacagatctctactaggtgatatatatataaccccatttttgtaatgatttaaagattcctacaatagaggaaccctaaatactgtagaggaatgtgaaaataactttagaaagtcagaggaaggaggttttgaagttggtccaggggagaatagaccataggaggccaagaaaggtaagtgaagtcctatgagaataggaactggtatcccattctacccgaagtgaaaaacagaaaatatgataggagtcactgttttgatcttgaagaatctaaatcagtctggaatagtaaatctgaatgaaacaggagcaacttttaaaagggacctgataaagcgcaagtgtcagtagctacatatacaaaagtgacttcagggcaaagcctcattgtcatgaacccaggctctaatccttctcatctcaagaaatctctcctgtctgccctgggccagtgctatccagctgccctctgaatccagcgctcctcacccccagtggggtattgccccttggcagggtgcttatttaccccttacttcaaaattaatcttttctcctttccttcttcccctatccaaacttttatcaactaaaaccttagttaaattgacactaaagttgaatagtaattagcttaagtgtaaagagaagaggtttattaatccacaggcatctctaatcagggaaatgtttcagggagaagggaggagttggctttgggaaagggttccttgcctgcttcagggatccagacacctcctgcccaaccatcctccaaaacaatggaacaaaataataaaataaatgcagcttggtaaaagatacacagtaggctaactgcctgagatttttctaggcaataagtttaaagatccataaacagcatgattgatgggtacagaaccatgcatcatgagctccttatgatgaaagaaaccgttattgccaaaggaaaacttgacttagcacatgacaaagaattcaaatctactttcttgtctcttacaaaaataataggattataacatcaagaacacttcagttggccaggcgtgatggctcatgcccgtaatcccagcactgtgggaggtcaaggtgggcagatcacctgagttcaggagttcaagaccagcctgtccaacatggtgaaactctatctctactaagaatacaaaaaaaaaaaaaatgagctgggtgtggtggcacacacctgtaatcccagctacttgggaggctgaggcaggagaatcacttgaacctgggaggaggaggttgcagtgaatcaagatcacaccactgcactccagcctggacaacaagaatgaaactccatctcaaaaaaaaaaaaccaaaaaaacacttcggctatagtattataatataccccccttatccacagggaatatgttccaagacacccaaggaatgcctgaaaccacagatagtaccaaacctatatatagtatgtctttgtatctgatcactaagacagctactaagtgactcgggggcaggcagtgtatacgatatgaataggctggacatagggatcattcacgttccaggtgagatggagaaggacgatgcagggtttcatcacactattcagaacagtgtgaaattgaaaacttatgaattattcatttccagaatttttcatttaatgtctttggactactgttgacagtgagtaactgaaaccacagaaagtgaaagtacagataagggaggggtactgtaattccatagtagaaatatgaatttgctcataatttttcctggcttagaatatcagcctaatattgaaacatggcttggaatgttttattaactaatttagtaaaaaaaacaaatcagtataagaaatgctcattgatcttaagcattccataggaggagagtctaatttccttacagattatgcagaccattaaaatatgcaaatgaaacatgagataataagttttattagtttttataggtgtatcacaatagccacatattaaatgtgagaatttgaaatggaagacttgccaactgccaagtcatcctaaatgaaagaggaaacaattagaaacagttgagtttagagatatcagaatgcataggtgacatgtttattatattttaaagcatgtttgaaagagaagagaaaagcactagaaatattgtcaccagtgtgattatcaattgaatgttcttttgttttaatttgggccaatgttttcaataggtgatcaacacaacccaagacccctgttcctgggtggataaactttctacagtacaccaccgcatagtgtaaggagaggttacttctttgctctattactctgtttcatatttggttaaagcagggattaccagcatgaagtaatgttcatctgagttcaagaagaaaattgtaatgcaagctttgacttctatctccatgcggcgaggtttttttgtccccagctgaattttaggtacagatgcccttgagctcaactgctttgagtaattactaaatcattgcatttatctccaaatgataagtagataataaaagcaacctaattttgcatgacttgtgtagctaaagtaaaagaggtagtaacgtgaccaacctgctctcagcagtcatagtcagattaggcaataaacttgtctagcactgcaccacccaggatgcccaccctgctctgggaatccccacactcctgtgtttagacagttatataattccagacattcattgtcaaatatagtggaacattctgtgtccgtgtgggtcctactccctctatctccataagaactcagagagttgggctcaacatcagcccctctactttagggtgttttttttgtggttgttctgttttttggacttccaaataaatatgaaaatacacactagtatatagtttgcattttacatttgatggctgctttaaacttcatgtggtgacaccttttgactcaagaatataaagccttctttttgatagcgtgtatgctatgtttacagggggaaagagcagcacctgacacatagtagatactcaataaatatttgaataatttgaatgaatgaaagaataacaaacaacatttggaagaaataaatatgttgctggttttgcgtcagaataaaaccaacctttcaaacaaaaaattttttcaaatttttttttcacaaagcctccccttcattaagatatttttaaagaaaaatatgttagttgtcttgtaattagctaggcttagtctattagtcttgtctgcgtttgggacgctccacggctatgaagtccagacctcacgtgacacagggatttccaggatgagtagaacatgttgccaaggtggtcttgtgaatttctacaggctcatgttactttatagtactatttaaattgactgatttaatttttaagctttggagggaattgtttttgcctacaactgtcttctgtttggaagggttttttgtgtgatttttttgttttttttagagacaaggtctcactctgtcgcctgggctggagtgcagtggcaaagtgctgggattataggcgaaagccaccacgcctggcctgttttctgttttctgtcattgtcctttgtgttaacttcaaggaactgttccaaaatatgaatcacctccccctacaatcattggaaatgcttgcttcatgcagatatggcccaagtctggggagtccgcctgactccagtgctgaaaatgaaacattttcttttttataaaaagaaatgttttgtctgaaatacccagattatttaattaaatcagcacttcttcttgaccatggcattgtcaactaaggcataggcaagttcgtggatttcaatagttgttttcaacaaaaatgcatttagtacttagtctgtcctagttctgtgctggatagcatggcctgttaaaatttttaaaaaatcataaagcatggtgtcagtatatagatatctcaatttaattagagtgccaagtttatttatgtagactgtacaatataactgtagcaatattctcatctatgtaatgacaacataattataatccattttaatttctataaatcatgtacttctaaaattagacactggtggactgaagctgtcctcctagtcctgatgccactttaatactgcagggtatttctgtgacttccgccagtcacagagcttgagataaatggatggtttttgcttgtttgtgatttgccttttgaagcatgtttatgattccatttgtgcgtttgtcagaaatactgctttgagccaagattaatagtgatttatttgttttgtaaggggctgcagtcttgcagtgatatctggagtactctatggatctacatttgtgccaatcatctacatcaaggaccacagcaaaagaaatgatagtatatatgcaggggcaagccaatatggtgagaataaaaagttatcttactttattaatatctactttttatgaatataaaaagaattgtgataatagtaaatattgatgggtcgattcgatctttctttgtccttgtaagtggcgaattagaaaggcattgaacaccaaaaataataaaggattgagcattttcatatgatctttaacatacaaatgcaaccaactttagccaggactcttttcaactacttggatctcaacacatggtttctgactttccagtaagatttggaaattattttccagttagatgatctctgggaaaatatatatacttctgttcttttaaaaaggctaaagtgtagtacatagtactttaaaatgaggtaaaggttaatgtatagcctacttggtcagaggatattatttttaaagtacagagtcatgcactggaaggcccaatgtaatgcttcctgttaatatctcagtttccattgacagaattaatctcccaagagtaaactcaatactatatgcaatagccttgtacaggttcaaaaggagatgaaagtgtttactttggggatctactaattatgttgaagcatggcttacaaccatgaaatgataagagaataagatcattcataaaataaagttctaaatcagatggcacagaaaattaatgtgacctctgttcagataaaggagaatttggagggcaaaagtcgtgagggaaagattgttaaagaagttgagatttgaactcaactttaacagaatggatagactgagtagatgccataatttccatcttcctttttatagttagccccatgtatattactcaaaccttttactgacttctgtctttcttttgttaaaattttatacaaatacttttttgcatttttacaaaaagatagaaattaataaaaatagaataacatagaataaattaaaacaaggtctcactaaagaaagaaaaacaagagtgggtatataaaaggaaccagaaacgaatctaaaaactttatactacatttgtatacttgctagaaaggaggcataaatttggctcttagagtccttgtaggcacaagggaaatcagatcagtctcatgattcaatgagcacaagataaaaacaactaattgttcaggagcacagatgttcttggtacagggacataataaacagtgtcctcaccaatctccacacaaagagaacaatggcttcttagggatcttgcttgtgacaactctgaatgtaatgtgatgggaacactttatcccagtttattcaaaaataatgaggggggattatttttatttcatttatttaaaaacacatatgtaatatgtgctctgtcctaagtattttacaaatactcagttaattctcatagcaactaataccctttctttgttttacgattgagaaaattaagacagagacgtgagatgatttgtccaagtcccaaagttagtgagtattgaaatgaggatttgcacccaggtggtccatgcttttaatcactgtattttgctttcttttgtggtggtccatatatagatgtattgcccttacatgatccagaaataggatttaagacttagagcaacagacaaactctctgtcaaacttttcttcctaaacatggccactcatctttgtcaaaattttaggggacagaaacattaaatccaacatggctttcccagccaagaacctgtagtgcacccatctgtgtggccacagtcccatctgcttaaacagtcagtggagttgggatttttccgagattgggccaccatgatgtgatattaactcccccatgtacttcgttttataatcaacaattgaataaagccctctctggattaacttcctgaacagccttctgtacagctgtcatctgcaacagagatgctggtctccagattgatcaatggatcctgtaaagttagcacccccaatttttttcattcacattctcactgtggtcaacctgaggatttgctataattgctattgtcattagtaaaattaggcctgagtgcctatttttaaaagggaggtattaacatcatagttacataattcattgtttcttatttagctttaccagatgatcataaaaactagcctttagttttgattatagtaactaatttactacttaatgtatctagattttaaatatattaattaaaattctatatgaacagcatgtagaaaactaggatgattaaatataattaatggggtttttttttttttttgagacagagtctcactctgttgcccaggctggagtgcagtggcatgatctctgctcacttcaagctccgcctcccaggttcacaccattctcctgcctcagcctcccaggtagctgggactgcaggcacctgccaccacacctggctaattttttgtatttttagtaaaggcagggtttcactgcattagccaggacagtctcgatctcctgacctcgtgatccacccggctcggcctcccaaagtgctaggattacaggtgtgagccactgcgctctgcctaattaatggtttatttgcctttaaggttaattctggtgagtttattttcagaaatctaaatatatctggaatgattaaaatggtgtttgagagtttttaatgtctattttcagatttagactatgtgtttgcgcacttcagtggcatctttcttacaagtactgtctactttctggcctactgcatagccatgaaaaatagtcctaaactatatcctgaagcagtcctaccaggtaagaatatgtactacagatcttcttactatatgaaagtgtcatctacaactcatttaacttgaataagtttcttctggaaacaaagccatcctctgtgtgtatatgtggtgtgtgtgtgttgtgtgtgtgtgtgtgtgcatgttcattccccctaattacttttgcccagttcaccaccaaatatgaagtattttaaatccttgaaactgaatatgcaatgttggccattattacagaacctaaaacttaaacaataaatctactaataagatattttcctgtgccaaacatcttctgtattgatcatcattctttactatttctttttcactatctaaaggttcatatatcaacaaataggaatatgcagtaacttgggaaaacagtttctacaaaatgtaagaagagatcgtgatgacttcaaaaaagacatatgttaaacatacatgcttttggatttaattcattaggcattgatcttttttaaaaatctcatttaggagtttattatgattcaatttggaatgtaggtccacaagtaaaattttttaaaggcaaaaataaagcataagtcagagacttgttctgaatgcctaacagatttatgctaaagaatgccaccgtgtagaaaatgctagaatactgaatgcctagctaaagtgctgtgaaagttttagctggtagttttacttaaatactacaggttttttttttttcttagccgtagcatcactctgatccactttattaatatctatggtttacggtaaatggtatttgcagataatgttcgggttcagtatgtcccctagtccccttttcatcacccagtctctacctcttttactactatgggtactttaatgctgataatgtgaaagcattgatcactctacccatagcaggcaagagtagagaaattacttgctctaaaataacaataaaacacagctcaaaattccatgttggccaacaacattgattagaatgcatttatatgtgcactttgatattcctgttgtagctcagtgtgagttcttcaggaggggaacatggtctgcaaatgtgtgttgtctttgtatttcaggattcctgtcaggagtactttgggctatagctacctgctgttggttcatagcaaatcactctctgagtgctgtggtcagttttccaataatcactgctgtaagtagctgaactggttttcctaattttcattttataaatgtaaacccaatttttctgaagcactcttagggcatcgctaaagactgtcatggagtttgattttttaggaatacaattaatggattcagatagataaactgaccctcttgaatcttcatgtgcttgattgctaaggaacatttctcacctcattttagcagggctgttactccttaatctttaatatccttgcagtttttggtttgattggtttatctaatgtaattttagcgacattgtaatttgctattgataactattattctctccttatataaaagtttataaatatgggacctcttaaagggaacattgaaaaacaaacaaacaatatccttcacaaaacttttatagtagacagagagttggtttttctaccattgtttcttgttttgagttagaataaagactgaggacaaaatgaaagcctaattcaaaggaaataaaccactgaagtaggtgagtgtgggcagaggatcagtgaaagtggtcactgtggcttttggcaacctgcccatcacagagattattcttgaaaaactgtaatggaagcaaagccttctcactcaccaggcataactttcttaccttgtgcgcttggtgcttgttatctgggaaggacaggtatttggaattggtgagggagtaggtccctattgctaccaggcccttgcttggttttattttagtcactttatccaaggacaaccttatctacacacagaagagttagtccctaccctcaacaatcttacattcttcattattttatttttttggtagggctagatttttaaaacttttttaaacttaaaatgtcaaacgaacctatcacctagtttcaacaattatgaatatggtcaatcaattttatcagaatacattttaaatatcccagcagtgctgttcttctcaggtatacatattcccatagttatatatccagtggtaactagactgagttccttgaaagtagtatccactttgtttattagcaaataacattccattaaaaagctaaaaaaaaagaaagaaagaaagaaaaaagtcacctagcaggggctgttacctctgctccatgtcttccttgataattctaaactgaatcagcttaatcttaagataggagcgagttcactttgttttcaaaggctgatttacacctaacttacattagtttacaaaaggaaaatatacaatccaaattaccaaaactgttgtatctcctatgaagatgtccttcctatttggctctccttggcctgaatcaaagagtcagtacatactttgacctatgcttgcattacttttaccaaagcacccttcctgtaaccacactactcacgataactcttaggccatgcttaaactcatatttagaaaacaatcagacaagaatcttcaaaggtcaatgataccttgtggtattgtcctgtaccatgttctctgaagggaaatggattttcagattaaaaattcttgagtgattagcataacattaatatggtatcctctgttctattgtttcctctcattctgttgaaagtcagtgtgggttgcctaaaagacccatatgcttcttgtttgatttggattttgaggcttaggaacttacatcattgataaaaggcagttcctttgacctatttctctggctcttttgatgttgactttccagatactgataaacagagaggagtgtattttttttgtttcacttacataccaagagtggaatcaaacttcattgactcagtccttttgtcagttggagtagtggtaggggaaaaacattttggaatctatttgaaactcttccagagtttctcggagtttgaagagcaatcataaaaatgctgatacaatacaccttctccacaaagaccacacctagcccgcattccaattttcttccttctcagctaagaagaattaccaccaaacttgaatagcttaaagtttataaattgcagaaccattcctttttttcacctgtttcttctcatttcctctgtcctgtattatttcattcttttctttgtctcctgcccagaaacccctattgtttttccttacacgtttattttaatcttcccataaacctttttttagcattcattggtgtttaatgttagccagacttgattgctctgtagtaatatcagttaaaaaaatttttaaagcacgagctacttccacaagtacattatttgttaggccaaaaagaatatgccaaaatttcttcagttacaagattatctcatgccaaagaaagttagaagcttgtgcacactttttcttattaatcccatttctagtatcctaaggaactaggccaatggaaaaaataagctatgtgcttataaaaataatttatgtcagatatattaaagtattatgtggcacaaaatattatagcatcatcaaaataatcaaaatgaagaccatgaagaaaagaaaatgaaaaaaagtcttcattttttttacttaatatcacctaaagtttagcttagtgtggagttagggttgatattatgggtagttttccctgaaaatatgtttatactgtctctaacttactatatttatatagaatctagtcataggtaaatatccaatttaattaaaatttatatttttatttaagggtccaggatttatagctgcaatgtggggtatcttcatgtttaaggaaataaaggtatgtacaagaaagggcagacttagaaaatgggaatggggtaggccgggcgtggtggctcacgcttgtcctggcactttgggaggccgaggcaggtggatcgtgaggttaggagttcaagaccagcctggccgagatggtgaaaccccgtctctactaaaaatacaaaaaattagctgggtgtggtggtgtgcacctgtaatcccagctacttgggaggctgaggcagagaattgcttgaacccgggaggcggaggttgcagtgagtcaagatcacgccactgccctccagtctgggcaaaagagcgagactccatctcaaaaaagaaaagaaaatgggaatgcattcaggtgagtaaagtatttaatatgtttgtgttattatctgaaaactgcctgtggtgcctaggtccagggccaacaactcatgaatggatttgacagataaaatgttcagaatgtgataatacctaattaggaaagaaaatactagagctatgataattataatgtaacatcatgtctctctccaccccatctccaatggaaaaatgctgtcgttgacttaaatttccctgaagtgattttaaataacccagtgaaatatgagagagggaaatttgtttaaaatatgataaacaagatgaaagattttttttttatcctaaaggttaaagtatcccctgaggtaaatcatctttgggaatagatgtttatattggttcctatgtctcccaaagacctccatgtcaaaccagcaattttgtaggaaaacagcatggtaacaggaggctattgccatttccttttcaaatgtaaatgatgggaatttaaaattgcattcatcaaatagttctagtaagagtgtgtgtgtgtgtgtgtgtgtgtgtgtgtgtgtgtgtgtgtgtgtgtgtgtatgttttctttaaaaatcactttgccgagcatggtggcatgcatctatattcccagctactcaggaggctgaggcagcagcatcacttgagcccaggagtttgatgtcagcctgggcaatcacaacgacaacaaaaggtacagtctcaagagtccaactgggttcaaatcctggctctgtcacatactagctgtgtgaccttggccaagtttcttaacctctctgtgtgtatagtccttatctgaaaatggggataaccaaccaagagagctgagagaatatgagtaaagtgctaaaaacactaccaagaacacaataaatgctcagttaattttgggggtgagggtcatataacctagcccaaactgtcgatagcaaaataaaacaagttaggagcagtggctcacacctgtaatcccagcacttgcgggaggattgcttgagcccaggagtttgagaccagcctaggcaacatagcaaaaccgctatctctacaaaaacaatttaaaaattagccaggtgtggtgaggaacacttgtagtcacagccactcagaaggctaaggagggaggattccttgggttcaggaggtcaaggctgcagcaagccatgatcataccactacactccaatctggacagctgagtgaaaccctgtctcctcaaaaaagaaaaagaaaaaaaaagaaagaataagaaaactcacaaaatcagagaacttctccccttctagccaggcatggtggcatctacctgtagtccaactatgcaggaggatcacttgagcctaggagttcaagtctagcctgggcaacatagtaagaccctgtctccctaacaatttaaagattttaaaatgtttaatctttttttaaaaaattgctttggaacttttcccagttacctttacttgtagaaaaagtcttcagttgaggaatatatgcaaatactcttttataagaatttttattaaagacaatgttgatccaaagacccctccccaatcaagtcatcatagacctgtcttaatatgcagttgtagtagcaaataattcctggttctaaggagattgatgttgctaatctctaacaaccataaagtgaatgtacttctacctgatctttaaaatgattattcaattttagatttaaaacatcatttcaatcattgtaaatgaaatattttgatttaaaatccattatttgataatacaagtaacattctcagatttaaaaaataataaacttgtttcaaaaatatgtggactatgatcagaatttttattttttttaaatacacaagaacaacttgaaacatttataaacctctaagttactttcgtgaacatttctcatttattgtagtcagagttcctttctacaaaaagtaactctatgcccaaaatatgttgtaaatctctctgcatatatttcatctacctcacaaaaaaagatttatttatattaaagaattggttattatctcatgtaagatgctgaagccttagaaaattacaaattagtcatcatagtttattagtaattataggtatgaagaagtacaaaccaagtatagatttatattaaagcatttgaaaattattttggtcatgactacaataataatactgaattgaaaatcctcttaactacatataagaaccctattcaaagagaatccctaaccaaaaagcctagtattaattgaaaaacagtgaggaatgttttgttttgtttttggtaaagacatctttaaaaagacacatcagactgaatagaaaagtaacttttaagattaatatactatgacccaatagggtttaattcaggaatgcaaggatcgttcataatacataaattaattaatatcatttactctaccatatcaaatatgaaaaggacgtgataatactatactaacctcttaataagctagaaataaaaggaagctttagtggtacagtatgtctatcaaaacaaaatagcaattatatacctgagtttcatgaaacataagagttctccatatattggaagtcaaggatttctccatactattatacgatatttcctatagatctagctagtttggaaacaccagaataagaaatgaaatgaataaatataggaaaagaaataagaaaattataatttgcagattacatttttaaaaaatgtacacattgtgatttcaatttattggtgacaaaaattaaaaattaaaataaaaatttaaaagaatcagctgaaaaatttaacatccaataagatcatttagtaaggcttgagatataaaataaatatgaaatcagttgccttccaatgtatcaccaacaaccagttaaaacgaggaaaataaatgctattaataataaccacaaaaattacataaaatctaattaaagaattaacaagtaatgtgccaggtttttaaaatactgtattttactttgctacaaacatgtactagaggacatagaagatcagaacaaatataggagacttgtcacatttctgatggaacatctcgctgttataattaggtagttctctctaattacgttcagtataattcctgtaaaatcccagtgaagctctttctagaatttttagagtaggtcctaaagtttggctaattatttatgtaaaaataggcaaaaaaaaaaaaaagcatgacagcacatataccatatttctgaaatgtgcaatttagattagctaggccagttttcttataaaataaggatttctaaacttaagaaaatgactgtttgctcttttctgttttaaaaaatgactaagataagattacaagtattaaaagaagagagagggccaagctgaaagcaaagaattaaaaaaaaaaaaaaaaaaaaaacctggggccaggcatggtggcttatgcctgtagtcccagcactttggcaagccaaggtggccagatcacttgagctcaggagttcaagaccagccagggtgacatggcaaaaccctgtctctacaaaaatacaaaaattaacctgctgtggtggtgcatgcctctagtcccagctgtttgggaggctgagatgggaagatggcttgaacctggaaagtggagattgcagtgagccaagattgcactctggcctgggtgacagagctagactctgtctcaaaataactaaccacataaataaataaacaaaaaatcttatatgtcatctacaagcaaaatttaacagatgtccaatggtacttattcaatgcagacacctaattgcctcttgacagctgatttaaagaaaaattttaaatacttacatgccaatcagtttagaaaagcatcatcaactgaacactaaagcctaaatatcataagaataatttttaaagtatttttgtagaaacaggacaaaaacccctaaactctaaagaagaaaacaaaagcaaacctgttatctgcaggactcataggtactgtcagttatatatcttaaagcagtccttgaagacgcatatttaaaagtctacaacctacagctgcgaggaataaagctgagagccaagcaccttttgtgtgaaggactttaatgattccatttagttttaatgccatcagtgcatcagttggatgttttcatacttctgatactcttttttgtttgtttgttttttgagatggagtctcgctctgttgcccacggtggagtggagtgatgcgatctcggctcactgcaaactccacctcctgggttcaagcgattctcctgcctcagcctcccgagtagctgggattacagaagcccgccaccacgcccagctaatttttgtatttttagtagagacggggtttcacagtgttggccaggcttgtctcgaactcctgatcttgtgatctgcccgcctcggcctcccaaagtgctgggattacaggcgtgagccaccgtgcccggccctgatattcttttatatctgatatctgttactcattgggaaattcattttagattattaaatctttaagctagatataaattatatttttaccaacacactttagtcagtatgtctacagtaatgccaacacaggcagttactaccacaacaatgtataggtcagtaagctactccctggtgaagaatgagatgatctattatcttagtagaaatccaagttaaaaaactttctgctttgggaagaatgttagtgtgctctttccaagagttaacatccacctttgatgaaggaaaaccattgctgttgcccaactataattagtctttttctctaggagactggacagttttagcaaaatcttaacattgaaggggaaaaaaatttttcattccctgagaacattattcttctgtctacataggtaataaaatagcgcttagcaatgtattcacgtaattagattgtagagtgcttgtaactgaagacccattttttaatttaagtaattgcatcaatttcaaattcacaaaatatacgtggaaatcaccttagtgtatttgttgtttgaacaaatgtttatggaatacctattctgcattagtaccagtatctaggtgagaattgcagtcttaaaaattaagaaaaaaaaaggtgctgggaaatccaaagcctactgccaggtgtgtgtgtgtgtgtgtgtgtgtgtgtgtgtgtgtgtgtgtgtgtttaaataagctgttctgcacttggcaaggttttcgggtgcttctatttgtagaatttgggattaaagtggcttctgttagtgctaaggatcacactgaatcagacaattcaactggccccaacctaacttgcaaagacctatctctggtcatcaaacagaggcaaatttatctactctgattctttaagttgaagaaagggaacatatatatataatttagttagtaacataattatttgattttgttaattaatacataacatatatatatatatatatatatatatatatatatagttacatattagttagcattaatcttacgaactaataatacaaaagacctttccttggcagttttcacattccctccatcctggactttgtttctgttctgttcagatttattacacaaatttacctctgatctctgcattcttccagtaaactagaaacacaagacctttaaggaagtgtgagggaagtaggcaaaatgaaaccagacaaaagtccactctttgaagtgagaatttcactgtggagccaggagagccacgtgttcctactgtcaacccgtctatcctgccccaaccctgtttcctgtgggagcccagttagaacttccctttctgggtttccctcaaagctgacctggctgcaaggcagcaaagacagaaccaccctctaccctctgaccccttgcatctatgctgggggaaatgagtctccctaagcctacactttgcatggcctggctgtaggaacccaagtttggtgcatgttcttcactgagtccttgagtgagcattaggggagatactcatgaatcagattagccctgaggattagcctctaacagcccagggtcctgcttttatgaacccactccccccaacaagtcagtcaactcttgcaccaaaaacacagcattctattcccactacctttcctgaagttttgcccaaatttgggtagtgtgaggctattaacctgttggacctcagtggccagaattttcaccagagagggaggacaccagccctattccctacagatttgaagctggcaggataccaactgctgcctagagttgcttcctctccattccttttttctttttccagaacccttatgtgtcttctacaatgacttacccatgaaccattgttatttttccttttaagaaggatctaatagtattattaaatagtgttattatctgattgtaatcttagatgtatctaaaattagagaggtgctagtcttgttttactttgtaatgttcaaaccttcccttagaatactggagtcttccgccttggattcagactctcctgatgacccacccttgggacccttagaccaggcagccagagattgccatgccctcattggcagagccaatgcccttaatcagcaggaagtagatacagaagactgacttcctcccacatcaagccttaaggataagggatagaaatctttaagtgagggggatgagacaggaataatacagggtggtcacagattaggaaaatcccaggcagcagtttcacatgactagcaaaaggaaacttgaaatagctgcagaggccatgggctgataagaccctgaaaaacagcatgtggatcaagctggctaagaccaattgaacccaacatggtgctggatttgccctaggtttcacctaggacctcattatacactcattaacatacaaatcacacacccaccagcaccatgacagttctgggaccacccatatttggtgtaaaaatgagtgacaccacagttctgagaaattgttacctttttccaggaatcttcatgaatattccacccctcggctaaagaaatgatgaaaataggaaccccaacccccttgtatgattctctcttgagtatgtccgcactccactttcttgagtgtgtacttttcactttgcaacaagtctctgtactttcactaaaaaaataaataaattagactctttaaacataaagaaggatatagacaaaatggcagtcattcagggggagcagccaggacaataaggaagcttgaaaccattccatatgaaaaatggtcaaagagctaaaatactgaccaggaaaagagatgcctccagggatatatgagagttatttttcaatgattgaggatttatcttgtgggagagatattaaaatcgatctatctgtactcctagtgatggaacttataggaaatgaaatatttctacttaacacaggaagatatttcgttgttaattcaaagatgggctgggcaacacagagaagtggttctcagtagttcccatctttaagaccaggcaccccatacataactgagcaagtccaacgaagtcattcttcacaccctctctgcatttcttcctcacccttcagatccatctccatctctccatctacccatcatcatcttttccctgggagactacagtcacctcctaattggtctccttgcatccattctggcccctccaatctgtctgccatcctgcagaaaagtgtgagctttacacaatgcaagtctgaaattttaacacagccagctgcctgtctttttaatgtcttcctctttgcttggaaaaacaggacccaaatttgagaggcagaggtgggcagatcacttgaggtcaggagttcaagaccagcctggccaacatggtaaaactctgcctctactaaaaatacaaaaattcactgggcttggtgatgcatgcctgtaatcccagctacttgggaggctgagacaggagaatcacctgaacccaggaggcggaggttgcagtgagccaagatcacgccactgaactccagcctaggtgacggagggagactccgtctcaaaaaaaaaaaaaaagaaaaaaagaaaaaaaaatagaacccaaagcataacaagtgctcaggtccatggtcttccaacctcatcttgctccacttaactttgattgcttcagtcacactaacctcctttcagtccctgggaaatattttgctttttcttacaacaggactgtgcacataaaattccttctacctggaatctctacttgctgccctagtcccctggccaattcactgatacttgtagttagaagctccacttcccaccctccaaaccagcatcattaagattcctgtaacacactctcaaacaaccatggtggtttgctttattattaacacccctctcacataataacattcttttctgtgattacttcctgtctcccatattatatgattgtttgcataaaggtacatgttgaagcttagtgggtgcccacatttatttacggaatgggtgaattcataaggctctgcaggggtttgtgagaacctgattacttggaaggggtagcaaaaaagggtacaggcggctagagcagatggttaggtccctagcaatcttgagagtctgtccattttgtgtaattgattcaggccttattcatcactgttattcttttttcttattcagggtctacaaaactacctattaatgatacttgcattttgcatcatcttgactggagccttatgcactgctttttctaaaatctaacaatgacaaaaccagcaggtggcagcagtagttaagagaacgcgtctatcggacagcggagagatcatgctgagaaaagagtgcattttcatatagcaaatggatctcagccactgttggagtgggtaaatgatttttttccccaaaaatgtgagaatgaaggaagattgagtttcattcaagtataaaaatgaaaatttcttctgatgaactgtttatgaaggtagtactttactgggtgactaaaatgtctacattattatagcattacatacgaggatgctctttttaccacagtatgtacctagtgttgcataatctagaacacagtatagagtccatatacaaagaagttacagtccatatttctcacctattaccccagtgaagtgaggcagaaataccttgggcgaggagggagagccttaccttctaatggaattagattccaaagatatttggatcctttgtttcataaagtaaatgcatagttggtaactaaatgttaaaaaggccattttattattgttagccaaaacttctgtttatttcaagttaatatcgcccaactctacatcatctacccattttagctcataatgcttttgattatcgccagataaagtccattctcagagaacaaaaatttttcatcattgagaaaatgtgcataacataatacatacatacacaagtatattcacgtacataaatacacacagatatgttgctaaagtgagattgtaggttatcagtaacaatttaaaggaaacaaccactcttttgaatgtacaacttttttttctgaaatacacttttctaaaaccctcttaactggaggtttcctgttttcttcttgttttaactggtggtttccagtaggcaaaataaaatgacaggcatgctagtttttttttttttttttttttttaagaaaactgaaattaagccaggcagggtggcgcactactataatcccagctgctggggcggctgaagtaggagggtcacttagcccaagagtgcaaatctgccagcctaggcaacatagcaaggtcccatctctaaaaaagaaatttaatttaaatttgtaagaaaaaagaaaactgaaacagaactgccagtacaatgtttgttgcaattgtttccaaaactttgaaataacgaaacccctattcaaatgtaaattttacccattcccacctgatagtactgtttattactttgctatgcaggagaaacaaaacagctttttatttgtgtgtatactctgaagtcaatgtgcatgggttaaatcccacctctgcttcattttatttgtgtggctttggacaagttcctaagccctctgtgtcaggcccctcattaacaaaatggagtttatgatggcatctacctcacatggttattgtgtggttgaaattagttcaaatctgtaaagtatgttgatgagtatctggtacttggcaaacactatataattgttagctttattattatgtgttgtttgaaggggaaaaaagtttttgtagattggagaacaccatgtaagagctactaagctcaccaccttcccatccaaacaattattactcctctaaatgaatactacttaaaagtgatggagcttctgtttgtttattgaattgctaatacaaataaatatttgactataacttcttatactcattttaattttaacctgaaatgtcattaaattatgctgataaactttgaataaattgtgatacaaaagctatttttctcatttaaatatattttagaattttatattggataacttttaattattctttagttgggatttccaatttatatgcaaaattttaaatgtgaagtaaagcagtttcagaagaaaaatgaaaaatcagtcttattacctctatataatttatatatatccctatatatactttgtatatatatatacacacatttatatatgtatatatatacacatttatatatgtgtgtatatatatacacatttatatatatgtgtgtgtatatatatatacacatttatatatatgtnnnnnnnnnnnnnnnnnnnnnnnnnnnnnnnnnnnnnnnnnnnnnnnnnnnnnnnnnnnnnnnnnnnnnnnnnnnnnnnnnnnnnnnnnnnnnnnnnnnnnnnnnnnnnnnnnnnnnnnnnnnnnnnnnnnnnnnnnnnnnnnnnnnnnnnnnnnnnnnnnnnnnnnnnnnnnnnagtatatagtttctggtaccaaacaagctttttcaaaatggttaccaaaaagcaacttattatttagaggctagtctaaatgggcagttgccaaatctgcattttgtttgctcaccttaggaagtgaatgcctaactctcttgagacttttaggttttatttctcctaatctagtatggctaaattctagtgtttattttacatttttctggcatggctttctgtcaaatggcaaccccatctgtactaaagagatcctgccatcttgtgtacagagacagaactacattcagtagaagtagcagccaataaggcttgtatcagattatggaaattttctaccataggaacagaaaatcctaataaattttaaaggattaatagcacagcatctccccgaactacaaaatcttcttttattcctgacatactgatttatttatattcagagttactaactactagacttataagtctcaatattgatagagctaaaaaacacattgcgtaaaggcaagttgtggaaccatgtgcatagcataacatttaggtaaatttttagtaaccaaagtaataaatactttctataaatacgtatttatgtaaaaaaaaaaaaggaatttagctactaatagtctactgttgaccagaaaccttacctgtaacataaacagttaacacatattttgtatgttatatatattatatactatatttttacagtaatctagagaaaataaaatattgttaagaaaattatagggaagagaaaataaatttacagtattatactatatttaccgataccataagtttgcatcatctgattgcaagaagaatcttctgaaatgttgggcaactgcatctgcagacctcaatctgtggtacatatcaagcaattcaactttttctaataatgtcatgacttttctctgcttcttgggagcacttccagcatcactagtcgaggtccatatgggtcccatggtgttatccaaggtttacaaggtttaattttattgcaataaaaaatgatgaaaaatatacaggaactgcaagagatcataaccaccagaggcaattgactggagagacagttgactcacctggagatgattagcaccacatggtgctttaagtggatagtcgcaacgctagagctcaccacaatagcaacggagattttataatagatttatgtatattttacggtagtaaatgataaaatagactagtgtatatatctatagtattatatatattatatatagtattatatattatatatagtattatatatattatatatagtattatatattatatatagtattatatatattatatatagtattatatattatatatagtattatatatattatatatagtattatatattatatatagtattatatatattatatatagtattatatattatatatagtattatatatattatatatagtattatatattatatatagtattatatataatatatagtattatatatagtattatatatagtattatatatattatatatagtattatgtatatattatgtagtattatatatattatatatatatattattcatcacatacacaaaaagaagtgttcacctcacttggcaagagggacttgcatgtgtcaataaggaccttaagactggaagaccctggattatccaggtggtcacagtgtaatctcaagggtccttgaaagtggaagagaagaatcagagttgagaaggagataaggtgatggaaatggaggtcagagtgatgtcctatgagaaggactaaacccatgcattgttgactttcaagatgagggaagggaacacaggccaagaaatgtgggcagcttctagaagctggaaaagagaaggaaacagattcacccctacagcctccagaaaggcacagccttgccagtcccttggtgttagcccatgtcaggctcctaacctacagaactataagaaacaacatttgtattgttttaagccactaaatttgtgataatttgttacattagcaatggaaatacagagttacatgacttttttaataataattttcaatgtaaatgtaatatttttacatcttatagaaacttagaaagtttcaaactccacatatcacttatttatctcattgctacccctctttttcctcttctttgggtacattagaaggaatacaacttttgttctggatttatacaaagaaacaaactggtgttttctcatatcattcccactcttagagtcttagaaggtttcaaatttgcaaacagagatgcattggatatggtaatgagattactgatctgagagccaaaaaacttcgatgatcctcctggccttgcctctggtaggtaacatcactttgtgaggtattttaacttcctcatatttgtaaaatggttgttttcaactaaaggaattctaaatttatgcaaacataaaactttgtcactatggagacattctagtggtataatttaatagtatcccaagttgcttcaaggttcaccttacatatttgtatcccactcctgaagtacataatgggacgggacccaccaaacattgaatagagtcacccctttgcaaactgataaggtggcctggcactctcttttttgaaatcctaagtgtgggcacttacaacgctttaaattgaggcccccaatactgataaaataggaaaagtctcattttaacatgtgactctcaaaataggtccacattttttgtgtgggttccctactcacatatggactagtaaaatccacatccatttaccttaattcaacagtatcatctgtgttataaagatgttcaagttaagcatttcacatgtgtaaatgcatttgatattcattttaaaatccatattattttgtaggtaagggaactgagcctcagtaaattgtagtgccttatttttagccatgctgcaagtatgtgacaaaatcagaactttgagtcaggattttctactctaatcatttaatattcatgaaatgtcaaccatgtgtgaggcatggaggatagagaaagaactacagagacagggctctacgctacccctcaaaaggagcctacattcagcttatggtgtcatttccttgattaagcttctcctcctcttgtctgtctcctacaatactagcccatttctccacttcacactctcattattttagacacttttgtctctcctcagagctacgggcttcttgatctcacagtacatttctgatttacctttgtagtttcccttcactgatttaggtagccaatacaacatttttgcaaaataagtacaatgaatatttactgaatgaatgcaagtaagctaaatcctaaaggcctcatttggtgctaaaattatcttgtgtctcctatttaggtttcacactgaaagaagcagtttgagaaactgcttaattaaaagacattcaaattcaagacaatttacactttcactctgtaatcattttcataatagctcacatccaattaatacagtggataaaacttaaaaagtttaatgggaaacccttttaaatactctttagttgtcagaaagaacaaaagtaaaacttgtaattcctgtcacatcttcctcagttcaaagagtattttacagttagaataaaaaaaggagccaaataaaattacttaggtttttctttttttcttgttttttttctttgaggctcaaggagtacattcacaaaaataaattatattggctcccatatgaaattatcagggatgacattaaaactaagcagccaaggaaaacatgttggtgcaggctttagtttttctctaaatagaaaaattaatattctaagtaattttgaaatttaaaatattaaatttattaaagctgtaatgaattatacattgctcccttaaggaaaaaaaaaaatatcagtacctgtaagatgtatctgacattcacaaacagtaaccacccaaaaacaccaggtttggttgctggattaagattctaaaatctgatattctgattttagaatcttaatcttaataatgtatgtctctgtgttcctaaaatttttattttaaagtgcatgacacaatacatcatgaaataattcatagactactttcttaaaatttaagtagtttaagaaatccaggaaaatattctttcctattatttttgcataaattatagcataaatgaatatccacatcctacgtatataattagtaccatgaaatacaacttgctatgtatagtccctgccacatgttaggaaagtttatgagaattgggacctctccacagaagagtcattcaactttaataactaggggaaatgttggagttaggtagttggttaaaatggaatcttcacacaaaatgaggtatctggttgtcttacctttagttattactgtatattaatcttcatttaattcatctgtaaatacattttcaaatttgaccaccagagggaagtatagggttaattatgatagtctgtggtggtctatgttataaaatgtaaactttttttaagtttgggctctgtctctccctctccttccctccttcccttcttctctctctcctgtatctctgctctcaaatgaccatattttgccatttatagattcttaaaagctgaactataaaaaaagaaacctatcttctatttcccatgctatcagtctaattgtcaatgtgatgtctgcttttcagtcatcgagttttcatcactcttttgctttattattatatttggcttttataatttcctagaagttgaagacatcacaaaacaattcaatttttagacttatttaaacagaagagtctgttcttgccctagaatattcaggacgtagaagaaggctcacagccagtgctaccaacattaatgagtgctgctgaataaatattaagctagaaggcacatttttctctgacctaaaaacaaagacatcatcactaaatgattaggctgaatggcctcaggtttctctaagatgctctagtaattctttggcttcgttagactttttaggtcacagagacctggaactatttgccctgttatttttgaagactttttgcaagcacgaggcagaaatgttttctcaatagcctactatgtcaatcatttgttgtaattggatgttcactgaatatggattcttacagcatttgccatcacttgtagactgaattgaggaagatgcgttcctatttcctgagcacagaatgatgtttcactacggtaaaagtttgacataaagtgggatagcacatgagcctgttgtttatttcagctctgaaatgcctaatggaaaatcactatgagacaaattccacaaaaataggaaaattggacatgtctaacatgctcaaatcataagctgagatattttgcagaatttttatttctctctatttacacactaaaggtcatttagaatcctgtcacctcacttacatcatcttactcatgatgcttcttattgaggatctcaagtctgaaattcaaatattatgtatgtgctgtattggtaataaaatcatcaactttaatatgggaatgtgacatactaaatatgaggtcaggaaatatataaaactaaatctcacaatgtattttaatatattttgtgtattttatgaggagtagagagatgggaaagcaacttggtattggacactttcatatgagggattttttttgcaaacaccaaagactctacatgctgtactattttatgtaaatatgtaccttttctatggctattgcaaaaattctaaatacctaatcattgcttatcttcgatgctttgtaagactgatttacctcctgaaaagatgattcaagatcataaataaaaggaagaaaatgtcattttccttaacctttatgtgattttcctgggttctgcagcccccgctgtttgacttactattcattcaggcaaacttttcagaaaaggctatgggaaatccagcagggcctaaatggcctattcttatgcaatttacttgcccatgatacagaaaagcacatcaacaaaaatgcattcatattgatggaagttcaaaactacgttaaaagaaagttccttagagaacaagatgctagctctttttaatttttcatcgttaatttatattctccatccaaattctctctggaatggacatagatttttaaagtaggtttgtttattgtttatcagtaaaacaagtttgttttaaaaacaatgacaaaaacaaaagtataaaactaaaaattaaacaccacactcattctcttccaatctctctcaatttctacctttcttacacacacacacatgcttggtcttagagattgttttctatattttattactaaaattaaaaatgcttatatattatatgtgtattgaaacatcaccatgtgccccatgaatatgcacaatatttgtcaatttaaaaaataaaataaattaaatgctgccattaatatctttgcatatatattttatacacgtgtatatatttacaaggtgacttgttagaattaaaattgttgtatcacaaaatgatacacattttaaattttgatagttattgccataatgccctgcaaaaagttgtaactaaatttttgttctgctaacagattctccacacacttgctaaaatgatttttaaaaattatttcccaaagtgatgtgatttaaatggcttctgagcacctaagtgtgtctgtatgttaatttgtgatcagaatcatcatttcttcctatgtgtatcaggtccttgtacttcctttttttgtaactttttgggtcatctcaatatttttttctaggaagttctggaatgtatacttacaatttgtaagatctctttgtatattaagaagagttattcctttacctctgatatgattttttgtaaatattctcccagttcgttttttattttggttctattgatggttaccatgcatttagttcttatatggtaaaatgtatcaaatgttcctttttaacagacaggttttgatcacactctcgagataattatgtttttaatctctattattttgttctaatacttttattttcatgttttatatttaaatatttaatccatgtggagttaattttagaataaggaataaaagtttacctttattatttttccaaactcctatcagttaaccaagcaccatttattgaataactctgcttttcttcagtgttgtaaaaaatgtttttaatgtatttcaaattataataggtacttgaatcagtttctggactgtgtaattttttgtgctaagatcatacagttataaatatactgtctctttctctctttttttaagaggcgtcttgctctgtcaccccaatctaaagtacagtggcattaccatagctcactgcagccttgaactcctgggctcaagtgatcctcctgctctacctcccaagtaactgggactgtaggcacacaccaccacatatggctaatttttattttaagagattagggtctctctttgttgccaaggctgctcttgaacttctggcctcaagcaatcacctcagcgttctgagtagctaggattacaggtgcaagccactgtattcggctcctactgtgtcttaatactgtcttaaaattgtttacctcttccactatcattattcttctatttcaggttattctaggctattacttgtttgcttttccagatgaatttaaaataagacaattaaaatttcaaacagacaaacataagagcaactgaacatctgttggttttttgataggacaacatctgaatttgcaaatttaacttagggacagctgacatctttcaactgctgagtcttcctattcaaaagtacgcaatatcgttccacatttttgttaattttttcattatactaccacagggttttctattatattattactattattttaaaataccagttcttgatttcatttgtcagtgctactgtttatctaatttttatatttctgttttaatcatttccttttttactgcatgcgaaaggttttatttaactccttagctaatgaggaaaccaggaagatccagttgaaggtgagaattcgaagaattaacatatataggcaaaggaaaactgatataaatttataaataccttaccagcaaaactgatcaataatcatcgggcaataatcaactacatctccaccagatgcactttatttgcatctctaaagataagtatcatttgtgttaatatcagttttctgcaacttacagagctataaaacagctcaaagaccatgaaaggcacaggccccaacagaatcagataaactgcagagtgcactagaaaagacacccaacatcatctctttttctttccatttcaaagtcgtatacaaatttttctaacagaaatatggggttattttctaaggtaatatatttaaaatagtcatcgcagttcttggcacatcgtggttgatgctaaaaaatcctcttccctgtctttcagtctaatgatgtcacaggaagagagatgtccttcatgcaaatgagttggaaaagtgtgtaaaataggctgtagggctcagaggtgagaatattcacagctggcagggaaggtcttcctggtaaaagggatctggtcacctcaatcctatctcttttgcttgcaacacttatcccagagaaaatcctgaagttccaatacccataccaacatttctctgtcattttacagcatatacatcatgaccacttcggtatctcttttgatacttgagactcagtactgtaattactcccattttttgaaagacgattttttagagcagttttaggttcacagcaaaattgaacagaaggtacagagatttcccatatactttcatcctcacatatgtgtagcctcctcctttgtcaacatctctcaccagagtgttacatttgttacaattggtgaacctacattaccaaatcctaatcccccaaagtccatagtttacattagggttcactcttagatgtggtacattgtatacgtttgggcaaagttataatgacatgtatccaccattatacagagagtagtttcactgccctaaaaatcctctgtgctctgcctattcatcccctcccccaccacacaccctctcaccccgggaaaccacccatcactatcttgttttagctttgttttttccagaatgtcatatcattggaatcaaatagtatgtagcctttgcagattgccttttttcacttggtaatatgcatttaagttttctccatgtctttttagggcttgatagctctttttataagtgctgaataatatcccattataccacagtttatccactcacttattaaaggacatttttggcaattatgaatacatctgcaatacacatccacgtgcaggtttttgtgtgaacataagttttcaactcatttgggtaaatatcatatagtgtgattgctagatcgcatggtaagagtatgtttagtactgtaagaaactgccaaactgtcttccaaagtggctgttccattttgcattcccaccagcaatgaatgagagt

SEQ ID NO: 802 - DNA, 3336 bp, Homo sapiens
acactggcacgtagtgggcggatcgcgccggcgctgagtaggaaggagcttcagccgccagcccggaacgcatcataggttagcttttcaagacacttcctgcatctctgacctgttgcacctctgttatcttggcacctctgttatcttagcagcaagcacctgcctcagctgacccttgagccataacccatagggcttattccaaagggccagtgtgcaaaatatgaatccaagatggcattgtggaaagacgctgtacctcctgtgataaaattactttggtggtgcttttttctcatgtatctcgggaaactaaaaatctgaattgtattcagtggccttttccaaatgaagctcctgaaaagtacatcaagtctaaagtgaaccagctaactcattaagactggaatcatgagcaacaatggagcagacctaacctttggttacatctcctgttttgtagctatccttttgtttggctcaaattttgtgccacttaaaaaatttgatactggtgatggaatgtttctccagtgggttctttgtgctgccatatggttggttgccttggttgtcaatctgatattacattgtccaaagttttggccttttgcaatgcttgggggctgcatttgggcaacagggaacattgctgttgtcccaattatcaaaaccattggtttaggccttggaatcttaatctggggatcatttaatgccttaactggctgggcaagctcaaggtttggctggtttggattggatgcagaagaagtatcaaatccgctgctaaattacattggagctgggctatcagtagtaagtgctttcatatttttgttcatcaaaagtgaaataccaaataacacgtgttccatggataccactccattaataacagagcatgtgatcaacacaacccaagacccctgttcctgggtggataaactttctacagtacaccaccgcatagtgggctgcagtcttgcagtgatatctggagtactctatggatctacatttgtgccaatcatctacatcaaggaccacagcaaaagaaatgatagtatatatgcaggggcaagccaatatgatttagactatgtgtttgcgcacttcagtggcatctttcttacaagtactgtctactttctggcctactgcatagccatgaaaaatagtcctaaactatatcctgaagcagtcctaccaggattcctgtcaggagtactttgggctatagctacctgctgttggttcatagcaaatcactctctgagtgctgtggtcagttttccaataatcactgctggtccaggatttatagctgcaatgtggggtatcttcatgtttaaggaaataaagggtctacaaaactacctattaatgatacttgcattttgcatcatcttgactggagccttatgcactgctttttctaaaatctaacaatgacaaaaccagcaggtggcagcagtagttaagagaacgcgtctatcggacagcggagagatcatgctgagaaaagagtgcattttcatatagcaaatggatctcagccactgttggagtgggtaaatgatttttttccccaaaaatgtgagaatgaaggaagattgagtttcattcaagtataaaaatgaaaatttcttctgatgaactgtttatgaaggtagtactttactgggtgactaaaatgtctacattattatagcattacatacgaggatgctctttttaccacagtatgtacctagtgttgcataatctagaacacagtatagagtccatatacaaagaagttacagtccatatttctcacctattaccccagtgaagtgaggcagaaataccttgggcgaggagggagagccttaccttctaatggaattagattccaaagatatttggatcctttgtttcataaagtaaatgcatagttggtaactaaatgttaaaaaggccattttattattgttagccaaaacttctgtttatttcaagttaatatcgcccaactctacatcatctacccattttagctcataatgcttttgattatcgccagataaagtccattctcagagaacaaaaatttttcatcattgagaaaatgtgcataacataatacatacatacacaagtatattcacgtacataaatacacacagatatgttgctaaagtgagattgtaggttatcagtaacaatttaaaggaaacaaccactcttttgaatgtacaacttttttttctgaaatacacttttctaaaaccctcttaactggaggtttcctgttttcttcttgttttaactggtggtttccagtaggcaaaataaaatgacaggcatgctagtttttttttttttttttttttttaagaaaactgaaattaagccaggcagggtggcgcactactataatcccagctgctggggcggctgaagtaggagggtcacttagcccaagagtgcaaatctgccagcctaggcaacatagcaaggtcccatctctaaaaaagaaatttaatttaaatttgtaagaaaaaagaaaactgaaacagaactgccagtacaatgtttgttgcaattgtttccaaaactttgaaataacgaaacccctattcaaatgtaaattttacccattcccacctgatagtactgtttattactttgctatgcaggagaaacaaaacagctttttatttgtgtgtatactctgaagtcaatgtgcatgggttaaatcccacctctgcttcattttatttgtgtggctttggacaagttcctaagccctctgtgtcaggcccctcattaacaaaatggagtttatgatggcatctacctcacatggttattgtgtggttgaaattagttcaaatctgtaaagtatgttgatgagtatctggtacttggcaaacactatataattgttagctttattattatgtgttgtttgaaggggaaaaaagtttttgtagattggagaacaccatgtaagagctactaagctcaccaccttcccatccaaacaattattactcctctaaatgaatactacttaaaagtgatggagcttctgtttgtttattgaattgctaatacaaataaatatttgactataacttcttatactcattttaattttaacctgaaatgtcattaaattatgctgataaactttgaataaattgtgatacaaaagctatttttctcatttaaatatattttagaattttatattggataacttttaattattctttagttgggatttccaatttatatgcaaaattttaaatgtgaagtaaagcagtttcagaagaaaaatga

SEQ ID NO: 803 - protein, 343 aa, Homo sapiens
MSNNGADLTFGYISCFVAILLFGSNFVPLKKFDTGDGMFLQWVLCAAIWLVVVNLILHCPKFWPFAMLGGCIWATGNIAVVPIIKTIGLGLGILIWGSFNALTGWASSRFGWFGLDAEEVSNPLLNYIGAGLSVVSAFIFLFIKSEIPNNTCSMDTTPLITEHVINTTQDPCSWVDKLSTVHHRIVGCSLAVISGVLYGSTFVPIIYIKDHSKRNDSIYAGASQYDLDYVFAHFSGIFLTSTVYFLAYCIAMKNSPKLYPEAVLPGFLSGVLWAIATCCWFIANHSLSAVVSFPIITAGPGFIAAMWGIFMFKEIKGLQNYLLMILAFCIILTGALCTAFSKI

SEQ ID NO: 804 - DNA, 3231 bp, Homo sapiens
aggcccatgtcaagaaggcctgagatctcccaccatcagctacagccaatttgtcagtcacagatcctcaaaatgagcagcagatacactcagtctgtaggatcatttagcaactcggggaaggaggtcataggttagcttttcaagacacttcctgcatctctgacctgttgcacctctgttatcttggcacctctgttatcttagcagcaagcacctgcctcagctgacccttgagccataacccataagctcctgaaaagtacatcaagtctaaagtgaaccagctaactcattaagactggaatcatgagcaacaatggagcagacctaacctttggttacatctcctgttttgtagctatccttttgtttggctcaaattttgtgccacttaaaaaatttgatactggtgatggaatgtttctccagtgggttctttgtgctgccatatggttggttgccttggttgtcaatctgatattacattgtccaaagttttggccttttgcaatgcttgggggctgcatttgggcaacagggaacattgctgttgtcccaattatcaaaaccattggtttaggccttggaatcttaatctggggatcatttaatgccttaactggctgggcaagctcaaggtttggctggtttggattggatgcagaagaagtatcaaatccgctgctaaattacattggagctgggctatcagtagtaagtgctttcatatttttgttcatcaaaagtgaaataccaaataacacgtgttccatggataccactccattaataacagagcatgtgatcaacacaacccaagacccctgttcctgggtggataaactttctacagtacaccaccgcatagtgggctgcagtcttgcagtgatatctggagtactctatggatctacatttgtgccaatcatctacatcaaggaccacagcaaaagaaatgatagtatatatgcaggggcaagccaatatgatttagactatgtgtttgcgcacttcagtggcatctttcttacaagtactgtctactttctggcctactgcatagccatgaaaaatagtcctaaactatatcctgaagcagtcctaccaggattcctgtcaggagtactttgggctatagctacctgctgttggttcatagcaaatcactctctgagtgctgtggtcagttttccaataatcactgctggtccaggatttatagctgcaatgtggggtatcttcatgtttaaggaaataaagggtctacaaaactacctattaatgatacttgcattttgcatcatcttgactggagccttatgcactgctttttctaaaatctaacaatgacaaaaccagcaggtggcagcagtagttaagagaacgcgtctatcggacagcggagagatcatgctgagaaaagagtgcattttcatatagcaaatggatctcagccactgttggagtgggtaaatgatttttttccccaaaaatgtgagaatgaaggaagattgagtttcattcaagtataaaaatgaaaatttcttctgatgaactgtttatgaaggtagtactttactgggtgactaaaatgtctacattattatagcattacatacgaggatgctctttttaccacagtatgtacctagtgttgcataatctagaacacagtatagagtccatatacaaagaagttacagtccatatttctcacctattaccccagtgaagtgaggcagaaataccttgggcgaggagggagagccttaccttctaatggaattagattccaaagatatttggatcctttgtttcataaagtaaatgcatagttggtaactaaatgttaaaaaggccattttattattgttagccaaaacttctgtttatttcaagttaatatcgcccaactctacatcatctacccattttagctcataatgcttttgattatcgccagataaagtccattctcagagaacaaaaatttttcatcattgagaaaatgtgcataacataatacatacatacacaagtatattcacgtacataaatacacacagatatgttgctaaagtgagattgtaggttatcagtaacaatttaaaggaaacaaccactcttttgaatgtacaacttttttttctgaaatacacttttctaaaaccctcttaactggaggtttcctgttttcttcttgttttaactggtggtttccagtaggcaaaataaaatgacaggcatgctagtttttttttttttttttttttttaagaaaactgaaattaagccaggcagggtggcgcactactataatcccagctgctggggcggctgaagtaggagggtcacttagcccaagagtgcaaatctgccagcctaggcaacatagcaaggtcccatctctaaaaaagaaatttaatttaaatttgtaagaaaaaagaaaactgaaacagaactgccagtacaatgtttgttgcaattgtttccaaaactttgaaataacgaaacccctattcaaatgtaaattttacccattcccacctgatagtactgtttattactttgctatgcaggagaaacaaaacagctttttatttgtgtgtatactctgaagtcaatgtgcatgggttaaatcccacctctgcttcattttatttgtgtggctttggacaagttcctaagccctctgtgtcaggcccctcattaacaaaatggagtttatgatggcatctacctcacatggttattgtgtggttgaaattagttcaaatctgtaaagtatgttgatgagtatctggtacttggcaaacactatataattgttagctttattattatgtgttgtttgaaggggaaaaaagtttttgtagattggagaacaccatgtaagagctactaagctcaccaccttcccatccaaacaattattactcctctaaatgaatactacttaaaagtgatggagcttctgtttgtttattgaattgctaatacaaataaatatttgactataacttcttatactcattttaattttaacctgaaatgtcattaaattatgctgataaactttgaataaattgtgatacaaaagctatttttctcatttaaatatattttagaattttatattggataacttttaattattctttagttgggatttccaatttatatgcaaaattttaaatgtgaagtaaagcagtttcagaagaaaaatga

SEQ ID NO: 805 - protein, 343 aa, Homo sapiens; identical to SEQ ID NO: 803

SEQ ID NO: 806 - DNA, 3332 bp, Homo sapiens
gtcgaaatgcacctcatgcactctaattagcacgtcaaattagtctctccgtttcagaggtgtagggcctttgtggagccttctcaataaaataatttgccactcttgaaggttagacattctcttctatcaatgtacacataaaggttttgttttgctttgcttgttgtgaattaaaatggggagaaaatgatgtgttagctatcacccagtcatgtgtctttttagtcataggttagcttttcaagacacttcctgcatctctgacctgttgcacctctgttatcttggcacctctgttatcttagcagcaagcacctgcctcagctgacccttgagccataacccataagctcctgaaaagtacatcaagtctaaagtgaaccagctaactcattaagactggaatcatgagcaacaatggagcagacctaacctttggttacatctcctgttttgtagctatccttttgtttggctcaaattttgtgccacttaaaaaatttgatactggtgatggaatgtttctccagtgggttctttgtgctgccatatggttggttgccttggttgtcaatctgatattacattgtccaaagttttggccttttgcaatgcttgggggctgcatttgggcaacagggaacattgctgttgtcccaattatcaaaaccattggtttaggccttggaatcttaatctggggatcatttaatgccttaactggctgggcaagctcaaggtttggctggtttggattggatgcagaagaagtatcaaatccgctgctaaattacattggagctgggctatcagtagtaagtgctttcatatttttgttcatcaaaagtgaaataccaaataacacgtgttccatggataccactccattaataacagagcatgtgatcaacacaacccaagacccctgttcctgggtggataaactttctacagtacaccaccgcatagtgggctgcagtcttgcagtgatatctggagtactctatggatctacatttgtgccaatcatctacatcaaggaccacagcaaaagaaatgatagtatatatgcaggggcaagccaatatgatttagactatgtgtttgcgcacttcagtggcatctttcttacaagtactgtctactttctggcctactgcatagccatgaaaaatagtcctaaactatatcctgaagcagtcctaccaggattcctgtcaggagtactttgggctatagctacctgctgttggttcatagcaaatcactctctgagtgctgtggtcagttttccaataatcactgctggtccaggatttatagctgcaatgtggggtatcttcatgtttaaggaaataaagggtctacaaaactacctattaatgatacttgcattttgcatcatcttgactggagccttatgcactgctttttctaaaatctaacaatgacaaaaccagcaggtggcagcagtagttaagagaacgcgtctatcggacagcggagagatcatgctgagaaaagagtgcattttcatatagcaaatggatctcagccactgttggagtgggtaaatgatttttttccccaaaaatgtgagaatgaaggaagattgagtttcattcaagtataaaaatgaaaatttcttctgatgaactgtttatgaaggtagtactttactgggtgactaaaatgtctacattattatagcattacatacgaggatgctctttttaccacagtatgtacctagtgttgcataatctagaacacagtatagagtccatatacaaagaagttacagtccatatttctcacctattaccccagtgaagtgaggcagaaataccttgggcgaggagggagagccttaccttctaatggaattagattccaaagatatttggatcctttgtttcataaagtaaatgcatagttggtaactaaatgttaaaaaggccattttattattgttagccaaaacttctgtttatttcaagttaatatcgcccaactctacatcatctacccattttagctcataatgcttttgattatcgccagataaagtccattctcagagaacaaaaatttttcatcattgagaaaatgtgcataacataatacatacatacacaagtatattcacgtacataaatacacacagatatgttgctaaagtgagattgtaggttatcagtaacaatttaaaggaaacaaccactcttttgaatgtacaacttttttttctgaaatacacttttctaaaaccctcttaactggaggtttcctgttttcttcttgttttaactggtggtttccagtaggcaaaataaaatgacaggcatgctagtttttttttttttttttttttttaagaaaactgaaattaagccaggcagggtggcgcactactataatcccagctgctggggcggctgaagtaggagggtcacttagcccaagagtgcaaatctgccagcctaggcaacatagcaaggtcccatctctaaaaaagaaatttaatttaaatttgtaagaaaaaagaaaactgaaacagaactgccagtacaatgtttgttgcaattgtttccaaaactttgaaataacgaaacccctattcaaatgtaaattttacccattcccacctgatagtactgtttattactttgctatgcaggagaaacaaaacagctttttatttgtgtgtatactctgaagtcaatgtgcatgggttaaatcccacctctgcttcattttatttgtgtggctttggacaagttcctaagccctctgtgtcaggcccctcattaacaaaatggagtttatgatggcatctacctcacatggttattgtgtggttgaaattagttcaaatctgtaaagtatgttgatgagtatctggtacttggcaaacactatataattgttagctttattattatgtgttgtttgaaggggaaaaaagtttttgtagattggagaacaccatgtaagagctactaagctcaccaccttcccatccaaacaattattactcctctaaatgaatactacttaaaagtgatggagcttctgtttgtttattgaattgctaatacaaataaatatttgactataacttcttatactcattttaattttaacctgaaatgtcattaaattatgctgataaactttgaataaattgtgatacaaaagctatttttctcatttaaatatattttagaattttatattggataacttttaattattctttagttgggatttccaatttatatgcaaaattttaaatgtgaagtaaagcagtttcagaagaaaaatga

SEQ ID NO: 807 - protein, 343 aa, Homo sapiens; identical to SEQ ID NO: 803

SEQ ID NO: 808 - DNA, 199868 bp, Mus musculus
  misc_feature (1)...(199868): n = A,T,C or G
tgaaggaactgtgctccctggtggcaggtgtgaaggaggccttctttgtggcagacatggctaccagtcaggaagcacatgccttgcttagaatactttttatttgtgatgtccagctccaagaataggaaagaactcgaagacagttcttgaggacaatttgctctactgagtacagcaaaataccagctactgagatagtttagttatgcattcagttcccttagttttgagatacacagtagcttgttttgcctggatattgacgtagaaggaaaaaagcaatcacgaaaagaactttgcatcaagatgaagttactttcgcttatcaaaataaagacaaatcaaatgtgtttcccaggcatcttaacattgagttggcacagttagtctttctatctcaaaccatccaaggcctggtacctctctcctcttgctttctacaatttcctgttttcccccttcaagatgctcaagagatgtaatccaagaccagttctctgctagcagcccttcccacccctgctagttcactagattcatcaaggccaatgcagggccctgtacaccagcagaaggaatgaatctaggcacagttttattccactacacttgctatatctctgctatgccccaaaacagtgactgtgcagtgggttgcatatgagtgagcactggctggaaggccacctgagtgctcaatgcctctctcaggctgtaatgtcttttgagtgacatttacttcatgctggaaggagttattcagtcttgacttggaaggccttttttttctggtttatgtagtgtgatcgagtctcttgggatcacttggctctctaggggactattactggggtagtattctttttattgaaatagattctcctctcatacaatacatctcagccactgtttcccctccctccactcctcctagtcccacacccataccccttctccctcagagccactccccctttgtttcttctgtagaaaagaacaggtctcaaagacaaaacaagatacactaagacaaggtgaagactcccatatggatacaaggcgacagggtggtatgttgttgtttaattttctttttggtgtagacaagcaggagtgcgtgtcaatttaagtaaaacctaaatcatagagactgatttacatgaaacacacacagtggtcagcctgagagcccatgctcagtctcaacactcagaaggctaaagtagatgggctgagattttcaggataccctcaaataaatcttaaatctggggttaatgtaagaagtagttacatgctgaaccatggttttacagctgcacttttaaagcactatttaactaggacacacataattatgaaaatagtcaccattgcccttttcatgctgatgtaacaacataccagatgatgttaagcaatgaatgaagaaaggagacttattcttctcacagttcttgaaagtacaaacaacacatctcctgtcctagtaaggctgtaatgtcccagggatatccctggctgagcagagaagcaatggtatgtatacaaataaggaagagcgagaaagagagagggagggagggagagagagagagagaaatagagagaaccaggtcccctcacatgacaaccacctcctttaggaaacatcccaaagctctgatacccaaccccacccatgggaccagaagcaatccattactagtagcaaagcctatacctatgagttcataagagtagacccaattgccttctggcaagcctggttctaataagcactatccccttgaagccactacattggtaccaagtttccagtacacaaaatcctggagaactaaccatatacaaactacaattcactataatcttagatttcaagaaggtcataatactagcaacttatgaaatcttccaaaggtatgtctaacattcttattttatactattgagctgacaaaaaggattcattaatagtacacaactatggtaaacatttatgcaccaaatctaggggtccacaatttcacaaaacaaacattaaagcatgagagaacacataggcccagacacaataataacagctaattctaagacctcactcacacatctaaatagatccttcttattaaaaatcagcaaagaaagattttgctgaagggaccctgatataactgtctcctgtgaggcttttccagtgcctggcaaatacagaagtggatgctcacagtcatctataggatggaacacagggctcccaatataggagctagagaaagtactcaagagctgaaggggtctgcaacccaaaaggtggaacaacaatatgaactaatcagtacccccccagagctcgtgtctctagatgcatatgtagcagaagatggcctagtcggccatcattgggaagagaggccccttggtctagcaaactttatatgccccagtacaggggaatgccagagccaagaagtaggagtgagtgagtaggggagcagggtgggggggagggtataggggacttttgggatagcattggaaatgtaaatgaagaaaatatctaataaaaatgtgggaaaaaaatcagcaaagaaacttcacttctccttcctacagcacttccttccctgcagcctggcatcgtgtgaattggcacagtctattagactgtagaagtttccctgaaagactttcctgttaaccagagctcttgaagtttgtacaacagaagacataaaattatttcacattgtaaaatttacaagtaacagacattgataaacaattaagaaatcaatcacagcattctaagcgcttggagcagtgacatagcatggatcatgaagtctgagagtgtccccaaaggattaaggacaaattccttcactgaagatactgaaaatgagtttcaaaggaaatggagagtgagagagcactaggaaggaagatcccacactagggaatgcgaaacagatgcacgctagctctagttttgatatgcgtaattgttattttctgattcatcgagaaatagatttggtatcctgaactctctcacgacagataacataaaaattagcagtgcttaattaaggtccttcagacttacagatgtgtaacaaagtatttatgaattggtgtaataaattgtttcccccactaaatataagttgaaatttttcaagcatatacttcactccataaggtttcccgaatgccagtggctaaatcaaaactatactatttggagaattttctctcattgtccagccttcaaattccaaaattttgcttttatccttaatacaaactgagggttcttagggaagttctttagaaagtgatcctgctcccaagctgcccacaacccacctgggactgtgaatcgcatgccatgcactgcagctgattttaatctccacagtgatgcatagggagagatgcagtatctaaaggaactggcagcagaacaacaaggagctttaaagattaaagtcaacactttccactgcactgaagaccgaagaggaagttaatgctgacccctgggcccaggtgtaatatcctccatatgttttagactttagctatggaagaagtgtagctctcagtattataaacaataaagttcgaagacaccatatttcgttttctattaagagtttagaagcacgagtggtgtggtataaactggacacctgtaatgaaaattgtccttgaatacagaatgttaaatagagaaatcgatagatatcttaaggtcttgaccaaagatgagctgaatagatgtccaatacctggaatcttggctcagatgtaactcactgcctagctcctaaagttacctcttcacagtggaaacatggccatatgaacagctgccgagtgtaaggaggagaatattaagccatgtacgtgagtaaaagttagttgaacactggaagatcaaagacaaaaaaaaaatcattttctctgcaagcatagtaagctaaagaaacagcccagcttgaaaaaaggctgtccttgaataaacatattaaatgcaaaaatcttactggaagcactaaatcaaacaagccgagagcacccctgccaatgagagaaaactctccaaatagtacagttttgatgtagccattgccatgtgggaaaccttgtgtactaaagtatatgcttgaaatttttcaacttatatttagtgggggaaacaatttattataccaattcataaatgtacaacagatggaatgcttctttttcagctcttggcaaagccttctattggatgaatagtctttggttcttaaaactatggccatcatcattcacacctattttcttaaattaaacagaccaattccatgatgaaatcgcctataaatttggttaccatagaatgccttctcattctgcaccataaattatctagaatgccacttgccttgaaataatgaagggggccaagcgggccgaaaggcattctacaataaaaaccattgggattccttaagtcaattttagaaaacccttcatattgcaatttattctggtagcactttaccataaatgattccactagaagtgtgttctttcatcctgaaccatgtacttggatcttttaaaatgcccacttactctaagatgttagaaaaattgtaatttaaatagatagatagatagatagatagatagatagatagatagatagatagatagaagcaatgaatatcagtttgtattctttttaaaaaatgtatcaaaaactgtcctggatatatgtgtcataaggtaactgagtttgatgcccaccagttatttaaagtaagaaatgtatcaatggataaagaagccaaaggacgtctgctccaagctggtgaggggacaggggaatgggaccaagcctagaagagtagcactagactttctatctatcatggtagctagcattgcccactgtctacttgaaagaagcaaaattggttcctcgggctgtttctctcaatgaaaacatcaaaaatctttagggtggtatcatggttagttttaggtgtcagtttatcagaaccttaaaactatgtaggaaagggatctcaatgaagacttcagttatctagatcaccttggtctgtaggcatatgtgccaggttgtcttgattgttcattaaagtgggaaaatctactctgaatataggcagtctcatttcatgggctgggccctgaactgtagtagaacagagaaggcgagccaggcttgaaacaataacccaacaaagaccagcacatctgattttctatctgctcttgactgaatatgatgccttatgttctggctctgacttctcctcagtaacagactgtgacatggggctataagctgagattctccctattattcccctaaattgccttatgtcagggtgttttcctacaacaacagaaatggaagtagagctaatgagatgattagcaaagcctagtgattgtagacccagtgttttacaagtttaaagagaagtcattgctcatccactcactggtctaagtaaatttgttcggtgtgggaaaggttggaagagacctctgtaccttagcaatcatccagtcaagaacatcagtaccatggtatctagacagatgggggaaatggttttaagggtcaagcccacattctaaaataggtaattctactactgcctcctgttggcaagaactcagtcaccctttcataggtaagaataaagaaggctggaaaagccatctcttgcagtgggaagaaagaaaaggagatgctttctgaaaaacagttttattctgataaatattacaaacacttaattgctgctaaaatcagagttgtagttagagaggtggctcagcagtcaggagcacatgttgaccctgcaaaaagacaggagtccaagtctcagcagctacatagtgaatcacactcatcctcaattacagttccaggggatccagtgacctcctctcacctctgtggacaccaggaataagtgtggtgcactcaacaatgctctggcaaaccactcacacacacacaacaatatttttttgttcaaactagtttgtaaagttatcacttgttagaaaaagctacggcttgtttctttacaatctaaaaacaacacttttagttgtaaagtctccatttccatttttctcttcttgcttcgctctcttatgtggaacccatgttgttaatcatctgctaatgacctggcgggatggctggtaagggaggagctttaccttgtggtgtgaactcacactcaagaagaagtgcaattagcagtaaaacatgacacataaacagtagttaatttttaaatggaacatgagcttaaatgccaataaatgtttttattacttcactcataaaagcacagttctccaagcagcttcaactagaagaaatatgaccaaaatttagactgatgtcatcagtctgtaagaaatccacccttacttttaagcaattatacaaagacagtttttatccaataacattaagaaacggttggtgaagaaggaagggctggagaaagggccatgagaatgagtgagcggcagactcattagttgccatggagatcctcatgaaaactctcctctagcaaattcctctgacatcaccactcctcggtcattttattcctgtaacaatgtaaacgtcacaagcgtaaatgtcacagagattgatgtaagccccttcccccaaaataaagtatacatattataaatactatattataaatgtattttactatattttaatataataccatattataaataagtatacatattataaatacttttttaattgtgaaagattatttttgagaagggttttttcttcagtatctgtatcaaaagggaggggattgctttcttcaactagtacaagttatgaacaaaagttaaaatggaatgcgatcagcaaacctggaataggacaacggggatcagctgttaccactgaccaggcagcttccggtctctgtgacaaagcacttgagataagcatcctcaggatttattttgccacatggtgtcagaaactttctggtcacttgggccagtccttttcagcctgtgacaaggcagagaggaatgtcacagtcggatgcaggtaatagaagaagcaatgagagacaggaagaagaccaggtcccgataacccattcccaaagaccccactgggctctgcctcctaactttttaccccctctcaatagcgccaccatctggagactagagccttagcatataggctttggaagccattgaaagtctgaactcataccaagtattcactccatggtcccagcactcatgatttctttctcaaagacagagtcagaagcagcgatcatgtaggttgtgctggacagagcacagcaacaggccacaggcagagcctgtcacccttggctggctgaggtaataaaaaaccactctaggtgtgtgggttcatttctgggtcttcagttctattccattggttggtgggattgcaggcttgtacaaccactctggtaatcagtctggcagttcctcagaaaattggacatagtactaccggaggatcccgcaatacctctcctgggcatatatccagaagatgtcccaaccggtaagaaggacacatgctccactatgttcatagcagccttatttataatagacagaagctggaaagaaaccagatacccctcaacagaggaatggatacagaaaatatggtacatctacacaatggagtactactcagctattaaaaagaatgaatttatgaaattcctagccaaatggatggacctggagggcatcatcctgagtgaggtaacacattaacaaaggaattcacacaatatatactcactgataagtggatattagccccaaacctaggatacccaagatataagatacaacttgctaaacacatgaaactcaagaagaatgtagactgaagtgtggacactatgcccctccttagaattgggaacaaaacacccatggaaggagttacagagacaaagtttggaactgagacgaaaggatggaccatgtagagactgccatatccagggatccaccccacaaccagcttccaaacgatgacaccattgcatacactagcaagattttattgaaaggacccagatgtagctgtctcttgtgagactatgccggggcctagcaaacacagaagtggatgctcacagtcagctattggatggatcacagggctcccaatggaggagctagagaaagtacacaaggagctaaagggatctgcaaccctataggtggaacaacaatatgaactaaccagtaccccagagctcttgactctagctgcatatgtatcaaaagatggcctagtcggccatcactggaaagagaggcccattggacaagcaaactatatatgccccagtacaggggaacgccagggccaaaaaaaaaaaaaaaaaaaaaaaaaaatgggaatgggtgggtagggaagtggggggaagggtatgggggatttttgggatagcattggaaatgtaattgaggaaaatatgtaataaaaaataaataaataaaccactctagacaccaggagtggtttggtgataagcaagcgtggctcagcactgtgctttgtatagacggaggagacagagaagtaccttgtttgagatctggtttttattacctcagccagccaagggtgacaggctctgcctgtggcctgttgctgtgctctgtccagcacaacctatatttgtcccaaggaaacttaagaaaagttaaataagtaggaccaaggaaatagcacagttggtaaagtgatcgccatgcatgcatgcacacttgagttcaacctagtccccagaatccacattaaacagccatgtgggaagataacgtgcttgtagtcctagccctggggagatggaaatgggcaaattgcacccctcaggctcactgctagactagcctattcagcaagccctgggctcctaaagaacctgtctcgacaagcaaggtagacggcctccacatgcctgtgtaccctgtttcatgtatacctaccttcacacacatgaacaagtacacacatacaaataaagtaagattggatagctcagtgctaaagtgtactcgctgctctttcagaggacctggggttcaattcacagcacgaatctacagtcgttactatgatgatcatcattttgcagactcagtctaactgtgatatcttagattagtttgggttagaaaaggggggggggtactctgcttgccaatgggataccctttagagcatgggttctaaatctgtgagttacaaccctcttggtaaagctctgtctctaaaatatttatattatggtttgtaacagtagcaaagttacagttatgaagtagcaatgaaaagaatttatagttgggggtcaccacaacatgagggattgtactgagtcacagcattaggaaggttgagaaccactgctttaaaaaaaaaaaatggagctgtttaggcagagcagatgaaatacagagacaagaggtgagatgaagaagagaaattcttcttcctgtgtggaagagttctggagattagaggttgaaaactgactaggctgtcattctcaatgctaggttggctgcaccagaggaaacttggggcggggaagcctgaatgagtaattttgagtttctacacattgtttattcggactagactttgttcccaagagaaacagaggagaaatgataaaagaaattagtaagccagctcgacccgctggaaaaatcaccagatataccctggtatttctggagtttggcacttagccactctgctactatggaaacggggaagcggttgacttgagggtccggaaccggtttggggggaagggagcgagatccgttcaggaactgggcgtggtctcggttaccaaggcctcagagacgctcaggcctggcctcagcccagttttgaggccaatgaacctcccatccttcgcatggcacccaagaaggagaaacctaccgggagcgcaaactataagatatgggaaccttccctcatagctgcacacttgaaccaggtgagcccggcctctcaagtccctctagtccagggagcctggagctctctgctcagcactgctctcccagatctgccaggtgcttgacaaaggagtgagctagagggatggggctacaactcagtggtggggctgagggaagaccctgggttcagtttgcagaaccagaagcaaaaacaagacaggaagggaatctcagccctgccatttcaaaatggggtggtagatctgtgtgaggagaacgagaacggggttgtcattatgactcctgagtccccctttcagtgcaggcaggcttccagtgcttcccccctgccccccttgtactgggactgttatccttgtgaactgtttccttcctgtttgaccggttgatccccccttgtactgggactgttatccttgtgaactgtttccttcctgtttgaccggttgatcattcgtatcattcgtggccccgcccacagcaatattttaattaatgctggatgtaatcagccaagacccagaactacaatctgtaaaaatagaaagatctctagaagaaaatgttcttatgtgatggcttgctctgttttggtctctgttgctctgataaataacctatttcattttaatgtttggggcaggaactagaagcagaaacccccgcaggaatcctgctccctgactctggctcatgctcagctagcttttttatacaccaccaggccacctaagataatgcctgatacaatgggctgggcattcctccatcaagactctctcacacagacttggccacaggcccctctgagatgcacaatccctcctttgagaccctgtcagatgactacaggctgtgtcaagttgacagctaaacaaattagaacatactccatacctctgcatccaacgttttcatctgggcatggagagaaagctcagtggttaagagcacttgctgctcttgcagaggaccaaggtttcattcccagaatctacatggtagctcccaactgtctgttactccagttcctggggatgctgtgctctactctggcctctgtgagcactgggcatgtatatagtacacatacatttgtgcaggcaaaacataaataaaatacatatatacaaaatactcatacatataaaatacatatacagaaaacaaaacagggtaattgcctaagaacattttctcctaagtccctttctatttttacagattgtcaccttgggtcctacctgtttacatccagcatttatgaaaatattactgtgggcagggccacaggtgacttggtgatatagcagtcaaacagaaacaggagctggagagatggctcagaggttaagatcactggctactcccccaaaggacttgggttcagctcccagcacccacatggtgggtcgcagccatcgtaattctagttcctaggaatcggatgtcctcttcctgttatcctgagacacctggcatgcacatggtacacagatctacacacaggcaaaatagtaagtagaaaatcattgtggaggcctgggtgaaggaggtcagcacctcagcactggtgttgcctgcctctttagcagcctggggtcgtgccagttcccacactggacctgcacagggaaatgagagatgtgttggaatgtgtagccagcccctcgggagccacatgcctgccttgtaacttctctgggcaacctgaagaccttatggattggtgtagtgctgtcttctattcggctatttagaaggtgtagatccgaggagctatccactcattgcacattgccacaaatgcacacagcaatctgtgactcaaaccagagggcccagcagcacagtgacccaggccccactcacctccacctttagtgagaaacccaggggcttctggcaccagcaggtagcaattcatgtctagactctaacatttctaagtccaagtagagatctggggagagaaaggccatttgcaggcattccagcctgccattgggactgtcttgtaaacgtggagaatcgacttggttttgtttttgttttttttttatattttatatatggatacatggttcactagagagtttgtagttaaggaaagtaaaatggaccttgtgctgccctctggggaaatgctgcctatttatccttattttccaatgtaattgtttctttctctatggaaagtaattctatctgagatgaaaattagtcctggtgagtcgtgtgaaagtagcctgaccctcctgttgccgctgtggcttcatgcatcgttactgtgcctcttctgcagggtttgaataactcaaggaatgaaggctgtcaacctcatactccccagctacattctcaaattctcagagatgtttgtcaaatcaccctgcaaaagtaccttctcttttacaagtcagatctagccaaaataatttaaaaaaaaatttttttggagatgatgttggtcacactgggcttggagcaagcatttctgctggaattctatgctgctgaaccacaggcttcgtggggacactgactctgtgtttgttagtctggtgctgcaagcacaaagctgtaattttcctagtggaactgaaaacccccaggcactattttttcttatagtttaaaaacatgaagtaatattcggccttcttaaccctgttcaaataatataggttcaataaatcttctatactggtagatataattgcaagtcaaagtaatatgtcactttagctatgaagggaatgagctcagctttcagtttgttggaatgcgtgctttcttattgttgggagaaaataaatatcttctacgtacttccatattttgttagcttggttttgtgcctgtaaaggagaaaatcctatcagttaatgcctaaatgcatgttccaaccgtgagaataaccaactctgactttggccaaaatgactatgcttgtgtaaagtccttgttcattgggtttggtaaggagcatcacatgtggtacgtctgagaataaggtattgttttaattcattaagagcttgttattcttttacaagtatatgtgtttgaatgcacctgtgctaatgtgtgtaacgaggtggggcatggaagacaatgtagtaattctctggtattatgaaagatagttttcaaattacctcattgaagaatccaaatcggtaatcgttctgttcttactctgagagcagcctgcactggaatttagcagaagcatcaagttcccagtttgactttggtgaattatcctcatttccttattatatctacaccaatcaattaatagatgaattgattaattaatttgttgattgtttaattgattgactggggagctggcctttcgagctggagttcttgccaacgtcccagtacattttagttgttcctgaaacataaatggtgacaagtaatagaaggcactattcttatcatcttataaaagaaaaggagttaccaagtattcagtgactaggagagatcagaggatcagaagaccactggaaaactgggtaatgttagacatgtagggtaaaggggaaattagtttgagtgaaaagaccaacatcaactgaaatgcttgaacagagacagagacagagacagagacagagacagagacagagacagagacagagagtaagcaaccaaggccccttttgggtgtacattgctcctgaattaagtctgcaaacccaactatcattgacagtttttgctgcccatctgccaagacacttattaacacatataaaacatgacaccttaaatctgaaaagaaaaaatgtttggatgcattggcagtaagattctacaagtgacaacagaggtctgtgtgtgacattgacacaagttgatctaccatggctttggcagcccaaagatgctgtgctgtagacattccctcttgacccaaagctgcacttcttaagatttcagctatcctcagccacctgtgctctgaaagcattaagcagacacttgtaactgttacactgcacagctttctgagaggcaccatccaatctcgtaccataccccctccaccccacctatgacatgagccatccttttgtccattgtgacggcagtgcatatcgtttgcacactggcctcttcagagccatccagtgtatcaaatagactgttgtgactgacacttgttgtgcagtgcacaagggttcaaatttcaccatcactgcactcggccctggcctcaccgtgcacgggtagttatgatggtgatttgggtgtgccaaaaggagcagagaagtgcttcctatgagtgaaaaggaaaatattattgatttaataaggaaaaaatggtaggttctgaagctgactgctatgagaatggatattctctcagtcaatttttgggaaaagggaaaagaaagacatgattactgttaagactgaaaaactttcatctccatggtaaattgcttagctgagacagaaaagacagtaggttatgggttcaacactatccacatggtcaggcagctattagagtcttagaatatatatccatgtaacagagactatcctataaattaaaatatttccatacagctgtcaaggcagaggccattggccactatgatgggaaaaagatgttaacatgtctattttctgttattgaaactcttttgactagctaataatttacaaagaacagttttctttcctatatatatattaaaaaccatcaaaccctaaaacatggtggcagcttccagcaagagccctggctgtgccataatatggtggagggtgtcccatatggaagtatttgaaagaaatgaataggactgaactgcttttaccaaaggctaccccatagcacttaagctactcctggggatggtattgaatgaaggtgatgtcaacatgaccagattgtctctttaattttatatttttcatgtgtttgcattatattacatttcattatgagcttttggcatgtggagaccataatatcaacctctagaagctgccattcctcctcctgtctgaaattgacttctaaatgtgttttatataggtataatcatgcagcatgtgtcttgtataactggtttgttttgcttagcatagtatctttgatggcttttgtactgtgggttagaattcctttactttaggatccatactatggtcacagtgctccatacccaaataccacttggaaagagctggtctcccaggagtgccaacacacctgtaagcacaggtaagactaccacttccactcaaattcctggcccaagaggatcctttcagaaccatcaggacacagaaaccaaggaacaacccgggacaggatccttctggtttccatctgcactccggagctgaccctgtaccacagctcttcatactcaaattcctccaggagagaactggtctcccaggagtactgacacacaagtttgcaggagggaagagccacagtcagagataataagaccaactgacaccagagaaaaccagatggcgagagtcaagggcaagaacataagcaacagaagccaaggctacttggcccagaacccagttctctcactgttgcttctgtctccaaccagcagaaaagagcgatgacacagcgttcttctcaaagcagtttattcaggaacctttcaacatgcaagcaggaatctcctctagcccccaatcgcaatcccttaatcccagcactcaggaggcagaggcaggcggatttctgagtttgaggtcagccaggtctacaaagtgagttccaggacagccagggctatacagannnnnnnnnnnnnnnnnnnncaaacaagcaacaaaacaaacaaacaagcaatcccttatataacccctcaaccacaccccatcagcccagtctgagtaattcattggccttcgtcaaatggcctgatcttgcatcatggtgcacctgcgcagctcttgcgatggtcatggctaattttcgggtgtatgaggaagtcaggtgcaagtcataagacttggctgcagtcccgggtgccatcttgggactaccgccacacccgctccccacatctcccccttttttcttttttggcagagagaatgcctgtcttagtttgccccctgcagcaatgccccttacccatcattgggagacaaacagctttggtttgatccctgtcttaggttggtgacacgcccagggagtcttacctgtcattgactacttctctagcatgccaagccacttgaggagactgtcctgtctccaccactgcaaaagcctgtatcatcaaggcttgggttctgcactgacaaaactgtatacggcaaatgcaccaaaagggcaggatgctgattaatatcagacacagggcaagtccaccaattctggcccactcgtttaagtgggagacagctgtagatccagctggccagtctttagccatggacatatccacacgggtggagttaatatggacgatggattgtttcaattccaaaactagtccatcaaaatgccatcaattccctgtaaggtactgagatatattgcaggataaattagcagcatgactggcattcacaaacggtataggtgtaacacacagtcccgaatatttccactcacaaccccaattgtgctgactccatcaaaacatccacttcttcctggactaaatcaaccctttgattcagcaataaaattcctgctttcagctggctattaatatttccctgaacatccaaagcttctgcaacaccagcggataaattattcacagccggagcagtttgtaccacagagataagggatatggccgcagccatggctgtggtggcagaaattgctatagcagtgacaatggccacagtaacgccaaaattccctcttaggtctaaacaaagtcatagcaaaaggagcttgaacaggccaaggtacaaagcgaggcatcctagtcataacagctaaatgatattcagatgcattccagcacatactataataacaaatatcactacttcaattaacaacattattctcataactaccattataaacaataaacacaaaaggaggccacaaacaaacaggcatagccttaaaggaagcattgcgccctccagcaagttgagatacagaggtttcatatacactagacccattccaataaaaatcttgcattaccccatacccctcccactagcatactcagaggagaaagatctgtgcaactaccattcacaccacacaacaaccacacattaaaaggattactagctcctacttgaactggattttgataggtccaattatatcctgaaaatgagctattatggactgtgccaatataaggagaaaacataaaatgtttcttgacagcccaagctgcctttctagactgacacccagtccgtggtggaagggaatcacgggaacctttgcaaaagggagcccatttaggttggagaggtatggtatcattgcctttggaaatactggcaggccacaccccttgaatccatgtgtcattagctttagtagaactattaattggcatatcgaaccacgctgctgtttgattatacatttgaacgcagccactattctgagaaatatcttgaatcatttgaaagcacagcaatcccctcaactgaagctgcatcggttcctggacaggagctatttccccatcccatggtaaaatagggtaactgcagcaaagcattagatgtggaaaatcgagggaacacttgtgccaaatgcatcaacagcatgggtttgggaaacacagataagattccccaatgtggatctccagtcatcaccacgggaagtatcctcaacaccaggaacatccacgccgtccccactcctctcattttggactgctctggtcaaccgttctgggacccacagcggctgtcagtgatcctgaggaaacacacaaacagaccctctcgcccaaaccaacactgaatcagggcccttccaacaaccagttaagacatccttccacatgaccatgccttttggagaaacatcaggatcaatgtgacactcggctgtgacctgtccatgtttgtcttcattcaaaaaattcaaggtaaaaagggcaatggctaatctctccctaggggtggaaccaacagaggcaattccccccttttgtttaattaagcattcttttagggtgcaatgggctcgttcaataatgccctgaccctgagggttatagggtaacccatgggtcaatcagacacccatcattttaccaaaagaaacaaaagaggcagaagtataagtcggcccattatcagtctttaatcctttaggttgtccccaggcaccccaagcttcaaagcaatgcgcagtcacgtgacatgccttctctcctgtatgcaaggaggtaaaaatgacaccagaagctgtatctatggagacatgaagataatttaactttccaaaatcagagaaatgggtaacatccatttgctataggtgcaaggggtgcaatccacatggattgactcccactcctatctgagacaataatggggcacatgtttggcacattttcacgatatctctcacctccatccgagaaattttaaatcaggaggataaggttttggaattaacatgaaactgtgaatgaaaatcacatgccaaatcaataggtgaggcaattaaaaaggccatgcgtgccttagaagctttatctacaatatcattcccttctgcaaggggtccaggcaatccggtatgagcacgaatatgttacacaaaaaatggtgaatgtctattcaagataaaatcttgcaatgtaagaactaatttcattactattctattagttactaatagattttagattaactttgcctaccacctccaaacattgcaacatattaacaacatattaaaacatattaaaagggcctggaattaattcaaacaccttaatcacaatttgcaattcaataacttgtggtgatgcggggggggggggagattgtatggtaactggtgatgatcctgctactaaatatgctccatatcctgtcttagaaccatctgtaaaaataagtgtagcatccggcaaaggattttttgaagtagcatgaggaaaaatcacaggatgaactttaatcaattgtaatattggatctttgggaaaatgatgatcaaattggccctgaaaactgtacctcaaaatggcacaatcatctactgtagctgatagcacttctagctgtttaacattatctggaactatcaaatcctctggcggaatgccaaaaaattgcacactttgctgaatagcaagcaaagccaattgagccactgaggcgggataataaacaagtgttttggctggggaaatctttggatgtatccagagcaagggagctccttgccataagacccccattggttgtgattctgttggcaaaatacacaatgcaataggctttgacgcatctcggcatttcaaggcagcatcttgaatgatctgctccactgaaagtaaagccgctctggcagcattagtaagatatctgggagaattcaaatctgtattgcctggtagaatatcataatggctgcaattatttattggttaaagacaaatagggtcagacccattgaatatctcccaataatttttaaaaatcatttaaggtacataaattatctgtgcgaatttggatcttttgtggggacaccaatcctgcagttatttttgttcctaaataatttactactatatccttttgtaccttttccggggccactactaaatttctttccttcaactgtgttaccacaaagctatacacttcatcaagtaactcttccatgggagcagcaataagaatgtcatccatgtaatgataacattttacctttggaaatctctttctaacctctttcaaggctgtatcaacatatagttgtcacatagtaggactgtttgccattccctgtggcaaaaccgtccattcaaatctcctatcaggtttagcatgattttgagaagggacagtaaaagtaaacctgactgcatctttatggtataaaggaatagagaaaaaaatctttgatatctaacactataatgggccaattcctgggcaaggcagaaggcaatggcagccctctctgtactggtcccattaaaatcatttgcttatttatttctctcaaatcatgtaaaagtctccattttcctgattttttttctttataacaaatataggagtattccacggagaggtggagggttgtatatggcccaattccagttgttcttgtactagttcctgtgcagccttcaatttttctgagggaagtggccactgaggaacccacaccggatcctcagttttccatgtgatcggtaatgctccctcagtggcccctaggaaaaacccaacccagcacgatcattctctctgcagatcagcactgtggaggctcttccttgtaaaaagcgacctagcccttttctggggacatagcccatatccaacatgatatccaaggccttggtgctgtagcttccttcattagttaaaataaagcccatctccttcagcagatcacgaccccataaagacactggaactgccaatacatatggctgaaactggccagaatgtccctctccatccctccaatttaggaggcaagagctcatttccagcatttgagcatatcccagtcctcttaaagtctgctctgactgttgcctcggccaaccagagggccagtccttggtactaatgatactacgattagcacctttatctaggaggccagacatggactttccttcaatagaaagctttaataaaggttgggtatcaagatccaaagagcaaaaaacattagaagtacctgttgagccaaagcccttgtcctgaattttttctccttgttctgaatcttttgcaggaaattgagaatgacagctagataaaagaagcaattgagctatcctatccccaggagaaatggcaataatgcctctaggggaggataccattatcttaatttgtccggtaaaatctggatctatcactcccagatgaactattaatccttgcatagtaaccgagcttcttcctaaattcaaccccactgtatcggccagtaatgggtctttgaaatctgtatccaccagctgtgaggttaatacgagtcaggtggcagaactgaggtcgagtcccgcactccctctcattgctctcctgggtgattccattgcattgggagtctcaaactgggccatcccttggttagtaccccatatatttgcaggccttggggtcgggagcccctcctcaagttttttggccgagcaccaccatttccagaatcaagaggcagtccatgaatatccttaactgatcgacaatcactggcccaatggttcccctttttgcattttgggcacagcccaggcatcttaggccactgatttcctgacccactcagctgtgggcattggtgcttcatgtgacctggctgcccacacttaaagcacttattgttcttctggccaccccttccttgggacatctgcatgacggcagcagccagaccagaattagagagaggccctcctagttctctgcatattttcatccaaacctctagccctttgtgtttatatggattaattgtttgcctgcattctttagtacactgctcaaaaatcagctgcttcaacaatggcatagcagtatcaggatctccaaacacctggcttcctgcctctactaaacgagccacaaaatctgcacatggctccgtggggccttggacgatcttggttaaattcccactcacttcccctttcaggagttctgcaccacatctttctctatcttctatgcaatttctcactaacttccagaccagcaaaaccccttttgataaagccccctgttcctctgcaaacctcaagtctttccctagtttttcccaactgggcaccataaaatgtcctgacaagggaaaccatggagaactatggatgaaatgggcaaatttctagacagataccagttaacaaagttaaatcatgatcaggttaatgatctaaatagtcctatatcccctaaagaaatagaagcagtaattaatggtctcccatccaaaaaaagccaggaccagatgggtttagtgcagcgatctatcagatcttcaaagaagatcaaattcgagttcttcacaaactattccacaaaatagaagcagaaggtactctacccaattcattctatgaagccacaattactctgatacctaaaccacagaaagacccaacaaagatagagaacttcagaccaaattcccttatgaatatcgatgcaaaaatcctcaataaaattctcgctaattgaatccaagaacacatcaaaacaatcatctatcctgacatagtaggtttcattccagggatgcagggatggtttaatatatgaaaatccatcaatgtaatccattatataaacaaacttaaagacaaaaaccacatgatcatctcgttagatgctgagaaagcatttgacaaaattcagcacccattcatgataaaagtcttggaaagatcaggaattcaaggcccatacctaaccatgataagagcaatctacagcaaaccagtagccaacatcaaagtaaatgtgagaagctggaagcaatcccactaaaatcagggagtagacaaggctgcccactttctccctacctattcaacattgtacttgaagtcctaactagagcaattggaaaacaaaaggagatcaaggggatacaaattggaaaggaagaagtcaaaatatcactttttgcagataatgtaatagtatatataagtgaccctaaaaattccaccagagaactcctaaacctgttaaatagcttcaataaagtagctggatataaaattaactcaaacaagtcaatggcctttccctaaacaaagaaagaacaggctgagaaagaaattagggaaacaacacccttctcaatagtcacaaataatataaaaaaaccttgtcgtgactctaaggaagtgaaagatctgtatgataagaacttcaagtctctgaagaaagaaattaaagaagatctcagaagatggaaagatctcccatgctcatggattggcaggatcaatatagtaaaaatggctatcttgccaaaagcaatctacagattcaaagcaatccccattaaaattccaactcaattcttcaacgaattagaaagagcaatctgaaaattcatctggaataacaaaaaacctaggatagcaaaaactcttctcaaggataaaagagcctgtgggggaatcaccatgcctgacctaaagctgtagtacagagcaattgtgataaaaaactgcagggtactagtatagcaacagacaagtagacaaatggaatagaattgaagacccagaaatgaacccacacacctatgatctcttgatctttgacagggagctaaaactatctagtgggaaaaagacagcattttcaacaaatggtgctggcacaactggcggttatcttgaagaagaatgcaaattgatccattcctatctccttgaactgaggtcaaatctaagtggattaaggaactccacataaaactagagacagtgaaacctatagaggagaaagtggagaaaagtctcgaagatatgggcacaggggaaaaattcctgaatagaacagcaatggcttgtgctataagatcgagaatcaacaaacgggacctcataaaattgcaaggcttctgtaaggcagaagacaccatcaataagacaaaaggccaccaacagattgggaaaggatctttacctatcctaagtcagacatggaattaatatccaatatatataaagaactcaagaaggtggactccagaaaatcaaataaccccattaaaaaatggggctcagagctaaacaaagaattctcacccgaggaataccgaatgactgagaagcacctgaaaaaatgttcagcatccttaatcatcagggaaatgcaaatcaaaacaaccatgagattccacctcacaccaatcagaatggctaagattaaaaattcaggtgacagcagatgctggcgaggatgtgaggaaagaggaacactcctccattgttggtgggattgcaagcttgtacaacaactctggaaatcagtctggcggttcctcagaaaattggacatagtactaccaaacgatcctgcaatacttctcctgggcagaatccagaagatgttctaaccggtaagaaggacacatgctccactatgttcatagcagccttatttacaatagccagaagctggaaagaacccagatgcctcttaacagaagaatggatacagaaaatgtggtacatttgcacaatggagtactactcagctattaaaaaatgaattataaaattcctaggccaatggatggacctggagggcatcatcctaagtgaggtaacccaatcacaaaagaactcacatgatatgtactcactgagaagtggatattagcccagaaacttagaatacccaaggtataagatacaatttgtaaaacacttgaaactcaagaagaacgaagaccaaagtgtggacactttgccccttcttagaattgggaacaaaacacccatggaaggagttacagagacaaagtttggagctgagacgaaaggatggaccatctagaggctgccatacctggggatccatcccataatcagcctccaaacactgacaccattgcatacactagcaagattgtgttgaaaggaccctgctatagctgtctcttatgaggctattcttgggcctagcaaacacagaagtggatgctcacagtcagctattggatggatcacagggcccccaatggaggagctagagaaagtacccaaggagctaaagggatctgcaaccctataggtggaacaacaatatgaactagccagtaccccccagagctcgtatctctagctgcacatgtatcagaagatgacctagtcggccatcagtagaaagagtggcccattggtcttgcaaactttatatgcctaagtacaggggaacaccaaggccaagaagtaggagtgagggccggaggagagtgtgggggggggggggggaggacttttgggatagcattggaaatgtaaatgaagaaaatacctaataaaaaaggaaaataaataaaaataaataaaaatcacatctcatgattataatcgaggactttaagaaggacataaataactcccttaaagaaacacaggatgcataccacacttcattgaaccacctatccattggtgaaccttgggtgatatccttccatgattagtgtggatgctgctgtgggttatgtaagtgtacaaatagatgctccagtgtgggagaatcgagggtggggaggtgggtttgggtgggtgggaggaacatcctcatagaagcagggggagggaggatggaatagggggtttctgagagcaggggaaaccgggaaaggggataacatttgaaatgcaaataaagaaaatatccaataaaaaagaaaaattatgtactagggttctttaagttctgaaaatctgtggattagctgcatcatctggcagatacatttgtgttttgttgttagtttggtttgattttgttcttattgttgtttttgcttttattttgttattgttgttattgtttaaagagttcccacaatggctaaagtttacaatcccaccagatatgtacaagagattcaagttctctacatcaccaccaatgtttgtactgttctgcaggctgttgctgttgttgtttgagggggatggatttttctttgatgttatttatgaaaatcatcctaactagtgtgaggtgatgtgttccttgtgtttttagttacaattctctaatgattaacaatgcattattaaagtccttctcagtcatccatacatcttttgtcaatttgttttttttttccattttttattaggtatttagctcatttacatttccaatgctataccaaaagtcccccttacccacccacccccactcccctacccacccactccccccctttggccctggcgttcccctgtaccggggcacacaaagtctgcgtgtccaatgggcctctctttccagtgatggccgactaggccatcttttgatacatatgcagctagagtcaagagctcaggggtactggttagttcataatgttgttccacctatagggttgaagatccctttagctccttgggtactttctctagctcctccattgggagccctgtgatccatccattagctgactgtgagcatccacttctgtgtttgctaggccccggcatagtctcacaagagacagctacatctgggtcctttcagtaaaatcttgctagtgtatgcaatggtgtcagcatttggaagctgattatggggtggatccctggatatggcagtctctacatggtccatcctttcatctcagctccatactttgtttctgtaactccttccatgggtgttttgttcccactactgaggaggcatagtgtccacacttcagtcttcatttttcttgagtttcatgtgtttaggaaattgtatcttatatcgtgggtatcctaggttttgggctagtatccacttatcagtgagtacatattgtgtgagttcctttgtgattgtgttacctcactcaggatgatgctctccaggtccatccatttggctaggaatttcataaattcattctttttaatagctgagtagtactccattgtgtagatgtaccacattttctgtatccattcctctgttgaggggcatctgggttctttccagtttctggctattataaataaggctgctatgaacatagtggagcatgtgtccttcttaccagttggggcttcttctggatatatgcccaggagaggtattgctggatcctccggtagtactatgtccaattttctgaggaaccgccagactgatttccagagtggttgtacaagcctgcaatcccaccaacaatggaggagtgttcctctttctccacatcctnnnnnnnnnnnnnnnnnnnnnnnnnnnnnnnnnnnnnnnnnnnnnnnnnnnnnnnnnnnnnnnnnnnnnnnnnnnnnnnnnnnnnnnnnnnnnnnnnnnnnnnnnnnnnnnnnnnnnnnnnnnnnnnnnnnnnnnnnnnnnnnnnnnnnnnnnnnnnnnnnnnnnnnnnnnnnnnnnnnnnnnnnnnnnnnnnnnnnnnnnnnnnnnnnnnnnnnnnnnnnnnnnnnnnnnnnnnnnnnnnnnnnnnnnnnnnnnnnnnnnnnnnnnnnnnnnnnnnnnnnnnnnnnnnnnnnnnnnnnnnnnnnnnnnnnnnnnnnnnnnnnnnnnnnnnnnnnnnnnnnnnnnnnnnnnnnnnnnnnnnnnnnnnnnnnnnnnnnnnnnnnnnnnnnnnnnnnnnnnnnnnnnnnnnnnnnnnnnnnnnnnnnnnnnnnnnnnnnnnnnnnnnnnnnnnnnnnnnnnnnnnnnnnnnnnnnnnnnnnnnnnnnnnnnnnnnnnnnnnnnnnnnnnnnnnnnnnnnnnnnnnnnnnnnnnnnnnnnnnnnnnnnnnnnnnnnnnnnnnnnnnnnnnnnnnnnnnnnnnnnnnnnnnnnnnnnnnnnnnnnnnnnnnnnnnnnnnnnnnnnnnnnnnnnnnnnnnnnnnnnnnnnnnnnnnnnnnnnnnnnnnnnnnnnnnnnnnnnnnnnnnnnnnnnnnnnnnnnnnnnnnnnnnnnnnnnnnnnnnnnnnnnnnnnnnnnnnnnnnnnnnnnnnnnnnnnnnnnnnnnnnnnnnnnnnnnnnnnnnnnnnnnnnnnnnnnnnnnnnnnnnnnnnnnnnnnnnnnnnnnnnnnnnnnnnnnnnnnnnnnnnnnnnnnnnnnnnnnnnnnnnnnnnnnnnnnnnnnnnnnnnnnnnnnnnnnnnnnnnnnnnnnnnnnnnnnnnnnnnnnnnnnnnnnnnnnnnnnnnnnnnnnnnnnnnnnnnnnnnnnnnnnnnnnnnnnnnnnnnnnnnnnnnnnnnnnnnnnnnnnnnnnnnnnnnnnnnnnnnnnnnnnnnnnnnnnnnnnnnnnnnnnnnnnnnnnnnnnnnnnnnnnnnnnnnnnnnnnnnnnnnnnnnnnnnnnnnnnnnnnnnnnnnnnnnnnnnnnnnnnnnnnnnnnnnnnnnnnnnnnnnnnnnnnnnnnnnnnnnnnnnnnnnnnnnnnnnnnnnnnnnnnnnnnnnnnnnnnnnnnnnnnnnnnnnnnnnnnnnnnnnnnnnnnnnnnnnnnnnnnnnnnnnnnnnnnnnnnnnnnnnnnnnnnnnnnnnnnnnnnnnnnnnnnnnnnnnnnnnnnnnnnnnnnnnnnnnnnnnnnnnnnnnnnnnnnnnnnnnnnnnnnnnnnnnnnnnnnnnnnnnnnnnnnnnnnnnnnnnnnnnnnnnnnnnnnnnnnnnnnnnnnnnnnnnnnnnnnnnnnnnnnnnnnnnnnnnnnnnnnnnnnnnnnnnnnnnnnnnnnnnnnnnnnnnnnnnnnnnnnnnnnnnnnnnnnnnnnnnnnnnnnnnnnnnnnnnnnnnnnnnnnnnnnnnnnnnnnnnnnnnnnnnnnnnnnnnnnnnnnnnnnnnnnnnnnnnnnnnnnnnnnnnnnnnnnnnnnnnnnnnnnnnnnnnnnnnnnnnnnnnnnnnnnnnnnnnnnnnnnnnnnnnnnnnnnnnnnnnnnnnnnnnnnnnnnnnnnnnnnnnnnnnnnnnnnnnnnnnnnnnnnnnnnnnnnnnnnnnnnnnnnnnnnnnnnnnnnnnnnnnnnnnnnnnnnnnnnnnnnnnnnnnnnnnnnnnnnnnnnnnnnnnnnnnnnnnnnnnnnnnnnnnnnnnnnnnnnnnnnnnnnnnnnnnnnnnnnnnnnnnnnnnnnnnnnnnnnnnnnnnnnnnnnnnnnnnnnnnnnnnnnnnnnnnnnnnnnnnnnnnnnnnnnnnnnnnnnnnnnnnnnnnnnnnnnnnnnnnnnnnnnnnnnnnnnnnnnnnnnnnnnnnnnnnnnnnnnnnnnnnnnnnnnnnnnnnnnnnnnnnnnnnnnnnnnnnnnnnnnnnnnnnnnnnnnnnnnnnnnnnnnnnnnnnnnnnnnnnnnnnnnnnnnnnnnnnnnnnnnnnnnnnnnnnnnnnnnnnnnnnnnnnnnnnnnnnnnnnnnnnnnnnnnnnnnnnnnnnnnnnnnnnnnnnnnnnnnnnnnnnnnnnnnnnnnnnnnnnnnnnnnnnnnnnnnnnnnnnnnnnnnnnnnnnnnnnnnnnnnnnnnnnnnnnnnnnnnnnnnnnnnnnnnnnnnnnnnnnnnnnnnnnnnnnnnnnnnnnnnnnnnnnnnnnnnnnnnnnnnnnnnnnnnnnnnnnnnnnnnnnnnnnnnnnnnnnnnnnnnnnnnnnnnnnnnnnnnnnnnnnnnnnnnnnnnnnnnnnnnnnnnnnnnnnnnnnnnnnnnnnnnnnnnnnnnnnnnnnnnnnnnnnnnnnnnnnnnnnnnnnnnnnnnnnnnnnnnnnnnnnnnnnnnnnnnnnnnnnnnnnnnnnnnnnnnnnnnnnnnnnnnnnnnnnnnnnnnnnnnnnnnnnnnnnnnnnnnnnnnnnnnnnnnnnnnnnnnnnnnnnnnnnnnnnnnnnnnnnnnnnnnnnnnnnnnnnnnnnnnnnnnnnnnnnnnnnnnnnnnnnnnnnnnnnnnnnnnnnnnnnnnnnnnnnnnnnnnnnnnnnnnnnnnnnnnnnnnnnnnnnnnnnnnnnnnnnnnnnnnnnnnnnnnnnnnnnnnnnnnnnnnnnnnnnnnnnnnnnnnnnnnnnnnnnnnnnnnnnnnnnnnnnnnnnnnnnnnnnnnnnnnnnnnnnnnnnnnnnnnnnnnnnnnnnnnnnnnnnnnnnnnnnnnnnnnnnnnnnnnnnnnnnnnnnnnnnnnnnnnnnnnnnnnnnnnnnnnnnnnnnnnnnnnnnnnnnnnnnnnnnnnnnnnnnnnnnnnnnnnnnnnnnnnnnnnnnnnnnnnnnnnnnnnnnnnnnnnnnnnnnnnnnnnnnnnnnnnnnnnnnnnnnnnnnnnnnnnnnnnnnnnnnnnnnnnnnnnnnnnnnnnnnnnnnnnnnnnnnnnnnnnnnnnnnnnnnnnnnnnnnnnnnnnnnnnnnnnnnnnnnnnnnnnnnnnnnnnnnnnnnnnnnnnnnnnnnnnnnnnnnnnnnnnnnnnnnnnnnnnnnnnnnnnnnnnnnnnnnnnnnnnnnnnnnnnnnnnnnnnnnnnnnnnnnnnnnnnnnnnnnnnnnnnnnnnnnnnnnnnnnnnnnnnnnnnnnnnccgcctccccagccgggtgggcacctgtcctccggtccggaaagtggccggctgtccccggcccacacagggtgctgcctcagcgcctctgtgcttctgcctgttccagaagctgtcaggttctctggcgcaccctctcacctgttcagactaatttcctaagttcggcgggtcccggaccaagatggcgaccgctgctgctgtggcttaggtcgcctccccagccgggcgggcacctgtcctccggtccggaaggtggccggctgtccccggcccacacagggtgctgcctcagcgcctctgtgcttccgcctgttccagaagctgtcaggttctctggcgcaccctctctcctgttcagactaatttcctaagttcggcgggtcccggaccaagatggcgaccgctgctgctgtggcttaggtcgcctccccagccgggcgggcacctgtcctccggtccggaaggtggcccggctgtccccggcccacacagggtgctgcctcagcgcctctgtgcttctgcctgttccagaagctgtcaggttctctggcgcaccctctcacctcatcttttgtcaatttgtaaactgagctgtttggtgatttattatcacattacaaaagatttttaactcttctagatagaaacctcctggctgatattatattttgaatgaatgtgttttcctacccccaaggtaatatttcaagacaagagactagaaagccccagtgtctccattccacacagaaacattaaacaacaataatgagattgggggaggcaaatgcttaaaattaaaataacccttgagaaagtatggacagtgaaatcagtcagtgattgaaggtgataaacaaagcagggaagcaaggtgattcaccgcgtttttagtcttgtgtgctgcgtagtgtggtatggctgctgcatggttgggaccttccttcctggttagtgctgtgggcttctcagactccatactttctaatagttagtattcaggcatgcagannnnnnnnnnnnnnnnnnnnattgtgttgaaaggaccctgctatagctgtctcttatgaggctattcttgggcctagcaaacacagaagtggatgctcacagtcagctattggatggatcacagggcccccaatggaggagctagagaaagtacccaaggagctaaagggatctgcaaccctataggtggaacaacaatatgaactagccagtaccccccagagctcgtatctctagctgcacatgtatcagaagatgacctagtcggccatcagtggaaagagtggcccattggtcttgcaaactttatatgcctaagtacaggggaacaccaaggccaagaagtaggagtgggtgccggaggagagtgtggggggggggggaggacttttgggatagcattggaaatgtaaatgaagaaaatacctaataaaaaaggaaaataaataaaaataaataaaaatcacatctcatgattataatcgaggactttaagaaggacataaataactcccttaaagaaacacaggatgcataccacacttcattgaaccacctatccattggtgaaccttgggtgatatccttccatgattagtgtggatgctgctgtgggttatgtaagtgtacaaatagatgctccagtgtgggagaatcgagggtggggaggtgggtttgggtggnnnnnnnnnnnnnnnnnnnnnnnnnnnnnnnnnnnnnnnnnnnnnnnnnnnnnnnnnnnnnnnnnnnnnnnnnnnnnnnnnnnnnnnnnnnnnnnnnnnnnnnnnnnnnnnnnnnnnnnnnnnnnnnnnnnnnnnnnnnnnnnnnnnnnnnnnnnnnnnnnnnnnnnnnnnnnnnnnnnnnnnnnnnnnnnnnnnnnnnnnnnnnnnnnnnnnnnnnnnnnnnnnnnnnnnnnnnnnnnnnnnnnnnnnnnnnnnnnnnnnnnnnnnnnnnnnnnnnnnnnnnnnnnnnnnnnnnnnnnnnnnnnnnnnnnnnnnnnnnnnnnnnnnnnnnnnnnnnnnnnnnnnnnnnnnnnnnnnnnnnnnnnnnnnnnnnnnnnnnnnnnnnnnnnnnnnnnnnnnnnnnnnnnnnnnnnnnnnnnnnnnnnnnnnnnnnnnnnnnnnnnnntggccggctgtccccggcccacacagggtgctgcctcagcgcctctgtgcttctgcctgttccagaagctgtcaggttctctggcgcaccctctcacctcatcttttgtcaatttgtaaactgagctgtttggtgatttattatcacattacaaaagatttttaactcttctagatagaaacctcctggctgatattatattttgaatgaatgtgttttcctacccccaaggtaatatttcaagacaagagactagaaagccccagtgtctccattccacacagaaacattaaacaacaataatgagattgggggaggcaaatgcttaaaattaaaataacccttgagaaagtatggacagtgaaatcagtcagtgattgaaggtgataaacaaagcagggaagcaaggtgattcaccgcgtttttagtcttgtgtgctgcgtagtgtggtatggctgctgcatggttgggaccttccttcctggttagtgctgtgggcttctcagactccatactttctaatagttagtattcaggcatgcagatctttactctgcctgcccatggctgcaggcaagctgctctactggagtttctagttcagtcactgtgtttttcagcgttgaggcttctgttgctccttttcagacatcctttggtgatctcagcatattcagacagttgtttagaaacatctaataaatgtaatgcatacatctctccatggcaatttgttattttaataaaccacgtttttctgtttctctgtgagtcttacaattagtcaaaaactggacacttggaaacacacaaccattctagggtttgtagatggacatggaagattttagtgtactaggacatatcccaacctttggtgacaatgggagattaaatatcggggtcttctccatcttattttggcctccctgctagctggatttaagtttgtaagttttctgttttccccatatatcccactggggcaattgatgtcctgttgccttctttcttctacccgttatccgtttccccagtgatctaggctcttactgcccttgaagctttcgtgtgttcaaatcacatcagcctctttcagctctaccagactgggtacacacttcgctgttctctctggataagctctggatcatagcagatatagtcagctcccgtacaacctacagacaaattctaagagagttctcctctgctctgctggcgcacaagaaggaatcaggacagaccatcctgacagtgccacccctagccacagcaccaatgcagcaaaggagaacaaaagcactgtgaaccatctcgcttaccacacttttataagccgctggggatctttgattttggtgactagcttttcctgggggttactttaatttggcacatttactttttgctgtcatggtggtcgtggtggtggtggtttctttccattgtttggcttttgtgtgtggaaataggtacttggactttctactctgatattttgataatttcacttcgattcaagttgtttttaataaagctccatattttttttccatttccttcttgcctagcctatagcaggtgactttgggagaagagaaataaatagcagctttattcatgacaatgtatgagacatttccagactttcttcaaatggcacaagtattccttattggagcttgcaggctatagtctgaacagtgcccatggctttgggttgcctaggatgtatgtttccattagaattttgtactagagtcagaacttttctatcgatacaaagaaaaagggtaagggctattagcaaactgggacgagaactccttttgttaacatattatatacttttctcccaaagatgttcatcagagtaccaggattctctggagttctgagctgctcaggttatctcacaggtagaacttggttcagaattttgtgaattacaatcattggattcttttatattttgatattatctggggtgggatatcttttcatttgtccctagtttaaagtatcatttttatccataatcaaaggcagacataacctacacaactgcctgttgacaggagaaccacgccactcttttactgtgaccaaacaaccaaaacactaaaacacagggaaagattgcagaccaatacaaccctttacctatacaaaaggcctgctcccagaaccattgatttccctgtggagtgatttcaggcccaaagtgtcccaattaaaagaccaggccctcttatcaccatttatctacagatagtccccactattctacttagtaagcctttaatttttctttaatataaatatttaaaaatacttagaagcacctgacctattgatgactttcctaagacacaaagccttgcttctagtttctatattttcactcttggtgcacgctcaccctttttaatttcccacaggtgagattctttgcacaatattgttttagaaatcacctccttctccacccctgcagaataacgggatgcatgagatgtccttagtagagataactcaaaactgtagtaagagggaagttgtagatagaccttgtaattgaaaggcaaacttgtacatttggtctcttacatcaatctctacagcattgttatgagatggaagttgtcagagtagaatcattggttacagaatggctgctggagtctatgtccttagtactcaaacttgagatggaagtgtttcttaaagcaaagaaacaaatctaaaaggcacactcaatttgtctgaaacatcagccttcctctctggctacctttgtcccctggctcccagcactttgtatttagatgaagctcttggcttcttcctgaggctagcacgtggaaatgcatgtgtatgtaccttgcaatttatgtctgtgagatacatattttttattaggaaagctgtttccaaaacagtgtagggagatagtcctttcccttctgataagtatataatgctctctggttgcacagctcaaactggctccaaaagacaggggcctccgtccttcacctcccccactctgtccccaacactgtcattctaacaataatccaacattgcctggggtcactagtcttattaaatactcagagacccatgttcagtctccgagtactccttgctgacattctcctccttccagtgtttctcctccattctcatgccttcattatagcccaatcctatgccttcagatgcctgaattgttaaaagagccccaatccctaatcaacataggaccactgagttccattcatcatgacccacccattttaaacatcattgttcccaagtactgctcacaccatggaaatccccatcttaaaagtattggtgaccaatagtgacttccagcaaaatctaatccacatgctttcttcagccctctctaaatctgttacaatggaccttaaaatggaattcgtatggatattctagtgtcctcatagcacagatccataaaaaaggtgacaagatgctggagtaaacccaactctaggaccagacatgcatgtgttcaatcccatttctcaagcagtgaaataaatgacctaagtttttttcatatgaccataacaatattttgaaggcttgctatgaataataataatgcttattttatgaacatatctatggcatgtagcatttagccttcagcaaatgcactgaccccccccacacacacacctctcctgctttcatgcctgtcagtgtcctcagtcaaaatgaatttccatgtcccacagtagctcctgtccatcagttgtgacctttatagaaaatgccccttattagctttcttctcaaaaaatatttatttgtattatttttaaattatgtatatatgggcacctatctaagtgtgggtatatacatgtgagtgcagatggccacggaggatagaagaaggtgctgacatcccagagctggagttacaggaggttttgtgctgccctgtgtgggtactttgactgaagttgggtccttcagaagagcaatatgctctctcaaccaccaagccatctctccatctcccgtacaccttttttttaaggcttacacctttttttagtaaactattttataaactttggctgacatttatcttccctttccttggctgtaggtgttacatttaactccatacttagttatagaacacgttttccaatgtggtgtcattttatgttttatactttatgggacacaagctattaggaaccacatcttacactcgaatgtacacccccccataattagcatcgttttaggtacacataaatgataaattccactgatttgcttattgatcttgaagcgcagtgaagcctgtctagtgggcaccagtctaagtagcagacagagggatatagagcagacaaccgatggtgttctgtagagcaagagtgaccagggaagtagcaggcatgtgagggaccattctctagaatgttcagttcatggttgctccttatgacacctctgtggaggcatgatattcttctcttattaaaggcaggaatacagctgcaagtccaaagccccctagagctacataaagagaactaaaccagccaggctacacagcaaaagcctgtcttgggaaggatatgtaatttagtcaggggagggcttgtcccacaagcatgagaacctaagatcagatttccaacacccacctaaaaacctgggcgtaatggctcaagtccgtaatctcagtgctggagaagtagagacaggcagattcctggaacttgctggccatcagcctaggcaaatcagtgaactccaggttcagtgtgagaccttttctgaaagaataaagtaaaaagtggctgaggaaaacagccagtgttgtcttctgacctacatatgtacacacatacataccaacgtgcacacatatacacatataagtgtatacaaacacatatacagtacaacacacagtgtatgcgtgcacacacacacacatagatcctgtctcaaaagaagacacatgcaatgcagcaagcccactggactgtgttactattcccaaaagaatgtctcaactctccattccactctgcagagacacttcgcctgccagccaggaggcatgctgggaaagttctccagaacatttagttcacagcctgtccttattacacctcagtggagaaataatatttttctcttattaaatgtagcccagtgacaatagctgagttgtgaacatttgggaaatagtaaaaaaaaaaaaaaaaaaaaaaaaagaaaaaaaaaaagaaagaaaaaagaaaatgctccaggagtcttgaacaaagcccgtggttcttgtaaaagtttggaaagtcgcattgagctgaagataggtgctgctgaaatattaatgtcccacatctcttaagtaaacctcatcgtagaatatgtaaaaccaggatgataataaaaacagtctaagtaaattttgaggggtaactgcgcaattgaattgaagtgcttgaagccattgtaagtgtagtctatcaaagaggaaagtgtgttttattggttagaacccttaagcaatttctgagaggtagtgaaggttttttcttttttttctccttttttgatcctaaacagtaagctatttctcatgttaatgtgtacttaagacttactggaaatactcataatatgagctgaagactgatgtctggcagcaggcgtatttctgaaattgggttggttttttactactatattttctgaaatatgccttcactggtatttacaaaacaaattgccagttcacacaaaggttgttttttaataaaagccaatgaaaacaagcgagttgctaggaagaacgttaaaagggaaatggacttttcataacctcacattataattcctccttctggacaaaagtgtattatttgaatgagtttggagctaaagggaattagtatgtcaaattatcccaccgagctgttatgtgtgatcatttttattgcaactgaaaaagagcagtaaatgcaagcaagaagtgagcgctgccagggagcttggcagcagcttaggaaaatgccagtggaagccatggtggctgttgatcagggttctctctggccatggaaactgtcactggctcccaattcccaaagtgtcctgcctatcccagtgacactagtcctgcttcttgtggcttttctctggccatctatctcctcttcctccactgaaagagaatggcctccacaagagctccaggcaattacctcccctcctgccaacttctttccattcacatcctctccagcaggatgcagaaagcaactcctgccatacccgctggcactcgctgactcgcctcttttcgataaacttcagtggttggcacttttaagaattacctcttttgaattgttgcactatgatttcaggggcaccccctggatggctgccctctgacgctacgaattcccagacatcccagactcctaatgcttcagatttgatctccccagctacatcatctagtagtgatggccacagcatgcttcctcccagatgaccaactggactaaatataccgatgtagatcgctgtctcctgagtaaggatcacacctcccccactgacaatgagaccattgctgaggtgactcgggccgttcaatacatgagaaatgctatcttgcttgtgattgaaggctttacatacccaaattccaactctgtgttgtccccagcaatcctgaccttgtctgaggctgttattcaccaagactgtaacaagaggaaaaccctaactgccttcccaagtcctcttctctagtctatgatcaactcttcctctcttactggctccacctttgaaatcatctaagctcccagccctgactccctgctgtgcctaacctgagtggcagccattttttgcccatgccacaaaacagccaagactattgtagctttgtctgtacctcctgtgctccctgcctcgacctccactctccagaaagcagccacatgatcctaacaaacgccttttaggtgtttctggcctctcctgactttgtttcaccctgtcgccaggcccactgtaaccacactggccttttgggtgatcctaaagccatcagacaacacagggctgccttggactttgttttgctgtgcctggaagttatgtgagccaagcttgtccatgcatgcctccttcaggttctgctccccagatgcccccttagaaggacaggacagaaactgtgaattaggtcatcatctctcatacagttttcctgccacacgagaccaggctatgagtggccagccactggctctttctctaggggctgccagatccctgtctggctcatggaggagctcagatgtgtttgctgaagtgctggaaatgagaaggagcacttgaggacagtatcgtcgctgtttgcaatagcaactcaggaaaatgcgtggcagtggaaggcacagaaaaccttccatatttatgcatagtcactatttctaatgtcactttatacatagactaaaagctcaacatactcatgactgaacaagcctttgctatggctgtcctatgcagtatcattaaaaatcaccccagtggccccatcatgaaaatggacagcaactcttgcctgttctttgcttctaaaccccttcagtctgacttcataatttctaattagcactattctagaatccttacctttcaccaacctgtcttcatccagaagtgaacatgcaaaatatttgaagagtcatcctatttcagttaagacacgtgtgaaaccataaatcagttttatctgctaagctatatcttggtaaatagcttgtcagatgataggatttttagtttattattcatcaagttgttctggtaatttcagaattgtgtgttgattttttgaatgtggtgtagtcttttggctagcttgactcactccttcaatgatgctttggctaagtacaatgagcccaagagcgctgggctcaaccacagctttcccatcgaacttataaccaataaatcagtgtgtgtgtgtgtgtgtgtgtgtgtgtgtgtgtgtgtgtgtgtggtgcttgctgtgtacacagagcccttattggtgttctcagcatactcaagaatctttcagtttttgctaagcttttagtattacaggtaaagcttttcttagccctcataccctcagagatttggcatatgtaattactttactatctttattattaaataaatgataaaattattgtaatgttatatttaactgacttaatttttctaaattaatgtcataatgtttatattaaaatagaaatgttagatttatatatacatatatttatatttactgtatatactatttatacagtaaaatattatgaagtaaatttataatacatataaataaatacatttatatacatgatacaacataccatatatacatgtatatcatatataatatatcttatatatcatgtatcatggtacatggtatcatagatcatgtacatgtatatcacatattatatattatgtatcatatatctcatatcatgtatcatataccatgtttcacataccatgtatcatagcatgtatcatatttcatatatcatatatcatgtatcattcatcatacatcatttaatcttatgtcatatatcatgtcaaatatcatataccaataaatcataatatatgcttatatgtttacatatgatgtggtataaaatttataatgcataaactataactaattgttttctttttagtcactttgcattccttgtgttatgaaccacagtgagaatagcatttgggactgaacacattgagtcagattagtccactgtagtggactaacagtaaacccatttccatacaattattgcatagccagatagcatttcttttgtaattgatatcttatcttgtttcaaaatacactttttacttcttagtttttatgtattttctcatattgctttattttttgaggtggcctaatgggcccattgctacctggtcatgcatctgcatcactggtcttcggtctcactcacgccccttcccagctgtttccctcccttccttcccccacttagcccaacttctagtttctatcacatgtttcccatcacttactattcttctcacctctctaaaactctcttcctcccttctcatcatcccgtttctagtctcatcacccatcataaataaacaaacacatacatatgactacatacatgcaaacacacacattttacgtctaggttccttgcacaagcaaaaccatgcaatgtttatttttctgagtctggcttattttcacttaacaaagtggtttctagttgcatccttcttcctgcaaatgtcatgatgtcatttttctttaggactgtataaaatttcagtgcctagatgtaccacatgggttttattcattcacctgttaatggatatctaggctggtccttcctgtcaccattgtgaatagtgcagcaatgaacatggacatgcagatgccattgcagtaccacttgtctcagcacaatttgttaaagaagctctcttgcaacatatgcttttgacagctttattgaaaaagtgcatggctatagctgtgtgggttttttttttctgggtcctctctcctaacccattggtcttcctgtctgatttgtgctgctacaatgatgtgtttggcttgggaatataatttgagatcaaaccttgatgccaacagcattgttctctctgccaaaatttgcttttgctaattgagatcttttatgctttcagatgaatttggggatttttttcttgttcaatgagccatgtcattgtgactatgaaggagatggcactggatgtgcacattgcttttggcaatacagacattcacactagcttcttctgtctatccaggagcagggaggtctttccacctgccagtttcttcttcagttattaagtatcataaatttctcactgtagaggcctcttactggcttgattggaattattgctaagtattttatgtttctgaagctatcagcaaagctttccagtgagggttttgtttttgttttgttttgtttgtttcttttttcatttaattcattgacttctacatttccaatgtttctgctttttaaatctttaatttccttgctgaatttttcctctatgttgcttgtttttgtttttgttttttgacttttcttctatgttgacttttccctctgggccctgtattgagttcatccacctattaattgattcctttttcacgtcattgatcacttttaccagcaaacttttgacatattcacctatccttagacttagttcagcatctgtgagttcagtagctgaggagttgtgatcttttagctgtgttgtaattagcacagctactggtttggatatctcttctggatttgagtgaagattttattaatgaatagcttactcatgacggttctattaccagtaccattctgtgagaaggaaatgaactgtagcaacagcaacactaagccctgcgaaatatagaagcaaacttaaaatcagttgcagcttacagtcacgccatcagtggtcccaaagcttcaagagaaaactactggggccatgttttgaccatggaaatttatgtagggtgactgtagaaataataaataaatgagaaaaagaaaagagatatttgtcttagtcagagttattattgctgtgatgaaataccatgaccaaaaagaacttgtggaaaaaagggtttattttgctcacagttccataaatgcggagaggggaggagctcacacaggacaggaacttggaggcaggagctgatgcagaggccttggacagtgctgcttacaggcttgctcttccgtggcttgttccggctgctctcttctagaacactgaaccaccagcccaagaatgtccccacccacaatggtcggggcctcctcccaccaatccctaattaagaaaatacactacaggcttgtctaaagcctggtcttatttatggagccattttcttccttccttccttccttccttccttcctttctttctttctttctttctttctttctttctttctttctttctttctttttcaattagatattttctttctttacatttcaaatgttatctcctttcctggtttcccctccgaaaaccccttatcctctaccctccccatgctcaccaacccacccactcccgcttcctggccctggcattcccctatactgaggcatagaaccttcacaggaccaagggcttctccttccactgatgactgaataggccatcctctgctacatatgcagctagagccatgaatcccaccatgtgttttcttcagttggtggtttagtcccagggagctctgagggtactggttagttcatattgttgctcctcctatgggactgcaaacccctccaactccttgggtactttctctagctccttcattgaggaccctctgctccatccaaccgatggctgtgaacatccacttctgtatttgtcaggcactggcagagtctctcaggagacagctatatcaggctcctggcagcaagctcttgttggcatccacaatagtgtctgggtttggtggttattctcaactgaggaatactgaatggctgagaagcacctaaaaaaatcttcaacatccttagtcatcagggaaatgcaaatcaaaacaagcccgagtattctacttcacactagtcagaatggctaaaattaaaaactcaggtgacagcagatgctggcaaggatgtggagaaagagaaacatttttccattgctggtgagattgcaagcttgtacaaccactctggaaatcagtttggcagttccttagaaaattggacataatactaccggaggatccaacaataccactcctggacatataccgagaatatgctccaacatgtaataaggacacatgctccactatgttcatagcacccttatttataatagccaaagccggaaagaacccatatgtccctcaacagagggatggatacagaaaatgtggtacatttatataatggaatactactcagctattaaaaacaatgaatttataaaattcttaggcaaatggatggatctggaggatatcatcctgagtaaggtaacccaatcacaaaagaactcagatgatatacactcaatgataagtggatattagcccagaagctcagaatacccaagatataatcgcaaaacacatgaagctcaagaagaaggaagaccaaagtatggatacttcaatccttcttagaagggggaacaaaatactcatggaaggagttacagagacaaagtgtggagcagagactgaaggaatggagccattttctagattgatgttccttctctctgatgactctggtttgtatcatggtcacctaaaactagccagtataatgtagagggggtcaagaggagaaataggttaaacaaaggaaaacaaagaataaagaagaatttgatagtgaggaaggaaaaagaacaagaagttacccaaattaagaaaaaacaaacaaacaaacaaaaaaaaaaacagggcttcccaaaactgaaaaagttcaaaaacaaaattagatgaatataagaataaaattaaaaacattaaaattttaaaaattaaaaacatggggcaaagcacaggatatctgaagcaataatagaacaatgaagaacttctagaggtatcattatcctgatcttaagctgtgttacagagcaatagtgacacacaacatgatactgatataaaaacaggcaggttgatcaatggaatcccatcaaagacccagaagtaaatccacacatttatgaatatttgatgtttgacaaagaagccaaaacaatacaatggataaaagaaaacatcttcaacaaatgttgctggtctaactggatgcatgtagaagaatgcaaatagatctatatctatctccctgcacaaaagtcaagtccacgtgaagcaaagacctcaacataaagcataaaactggatacgctaaatctaatagaaagtatggaatagctttgaatgcattgacaccacatctgacagagcactaatatcccaaatgtaaacaattccagaaactaaacatcaacaaaccaaatacctaattaaaaaaaaaaaacggtgtatagatctaaatacagacttctcaacaaagtaatctctaatagccaagagtacttgaagaaatgttcaacatccttagtcatcagggaaatgcaaatgaaaaggactctgagattccatcttcaattgaattttatggaaaaggtgaaatagattagacattgcacatgtatggcccagtcacgagtcccagcttgagacccatgccaggaaagggagcccacccctgactatgatgattgcagacagagcctagcataactgtcagagaagcttcacccagcagctgatggaaacaaatgcagagacccacagccaagccaagggagcttgagacgtcctgtggaagaggggaggaaggattgaaggagtcaatgacatcacaagaagactccaaccttggcccataggggttcatagagacagaactgccaaccatagaatatgcgtgggacagacacgggccccctgcacatatgcaccagttgtgcagctgggtcttcatgtgggacttctaaagcaggagcagtggctgtctgacaacatttcctccctttgcatccctttctcctaaccgggctgccttgtccatcctcagatgcacctaatgttagtgtaacttgatatgccaaggctggttggtatccacaggaagtatcttagttggggttttgttgctgtgaacagacaccatgatcaaagcaactcgtataaggacaacatctagttgtggcgggcttacaggttcagaggttcatcccattatcaaggcaggagaatggaagcatccaggcaggcatggtgtaggagaagctgagagttcttcatcttgttcttaagggaaacaggagaagactgacttccaggcagccaggacaagagtattaaagcccatacccacagtgacacacctactcaagcaaggctacacttcctagaagtactatgccctgggccaaacatatacaaaccatcacgggaggcctcctcttttctgaggagaagtggaagagggatggatggggagggaaaataataaggaggattttaagggagaggaaggagaagaggctgagatcagatgtgaagaaaataatttaataaacaaattaaaaacaacaaaatattttaaagccaataggtttcatcaaaatattacaatttgtaggaagaaagaaacaaagtaaaacagataaaaaaataaagtaaggttaaaatattgctcaaaaatagaaaaattataagtaaagctaggtaaatgtgtaaagaagtatagcattacatttagaattatttttacatacaataaagtaaaaagtctggtaaatacctgcaataattactttttgttttcaactcaactcaacctaaaatctctcagtgaggttgttaatgttgagttggcctgaggacaatcctgttgggattgtcgtaaataagttattgatgtaggaacaaccatcccactatgagtggcaccatccctaggcaaaggatcctgaaccctatgagtggagaaatataactaactacaagcaaccaagcaagcaaatacatatatgctggttactctctgctccgactacagatgtgatggctagttatttgaagctcctgccttgactcctccacagtgatggacgggaacctggaattagatgaaataaactctttcccctattctgccttttgatggggtattttatgacagcaatcaaaaagaagctaaaagaatatatgttttaaaataaaaaggtatataaacatcgttctgtgtccttgaaaactagcattgccaggtatgcggatgggggcaggcagggtcagttatactgtgtcctcctctttcctacggtttctgctgttgctgcttctgtatgagacaagcacctgcatgctatcttcaccataacttttcctttgtgttcctggagcctctgctggccacacttagctttgcagtctggggctgagcagattctctcaattgttgagaccccccagatcataccctctgaggtggctgtcttagctagaggtgtcccccaactactatggctgagtgtagaagcagccatagccctgagatgtgtgccagtggaagacctgacttcatgctaaagggattcaactatagatatcatgtacacctctagtaattcaggattgctagatttatagtagtgaatgacactaggtggctccagaattcagtctgcctaccagtctatcaactagagggcaggcactggtgaaaaagctcagcccatcaaatgctttcacagaagcagaaagacctgaattcagtgctgatcacctgcataacgagccagaagaatcccccaagatccttgatgagatggttagccaatgaagttggcatttccaggacccaatgaaagaccctctctttaaaaagcaaggctaataactcctgagaactgtacccgaggtttatctctggccttcacatatgcatgcatgcacacacatatatacacacagacacacacatgcatactctaaacacacacatgcacaccacatacacacatgcacacacatgcacacacacatacacacacacacatgtttgtgcacacacactcacatatattctctctctgtctctatctgtctctgtgactcgtctttctctgcctctctgtgtctttttttctgtctctctttgtctctgtctctctctgtctctgtctctttctgtctctctgtctctgtctctctgtctctgtctgtctctgtctgtctctctctctgtctctctctgtctcttcctctcctgggctctctctctctctctctctctctcacacacacacacacacacacacacacgcactccttagagggtaactacaagttgatatagtctgttcccagccatgaccccagcctaagtcagccttctgccacctgctcccttcagcttgtccatgctcatcctttcctcccattcagaatctgaggcaagccaaacagtctcattgacctatggattttccctgatctcgggcccccaaggtagctcagttttagcaatacatcctctcacgcgcctggccaccaccctccaggtcacacagtttaagaaaaagagactcgtttttcagtgagacaatttccccagtcaagccacctcctaagtctaaaatggagatttcttcccactaccctcccaactgctagaggactcattgtctcaccaaaacctgcggcaggatttgaggctcacagaggctatggggctgttctgggggcagagctagcaccttctgtcttgtaaatacaagtcattcagctttacctctcggtcaggaagcttcaaagctgaaaccacgttgggctcactgtttttcctcctgtgtcctttctccctgtacatcacagcaccctttcacttcttagtagatctttgaaactcttcttcagtttctctccttgggtaaagtctatttattcttactcagatgttttctgtctcgagatcactcagaggcatccccagcattcctctaggtatgtgatttgttcatgcatgtttctgtatcagtgactagtgtgttctttttcattcattgtataaatgccctctagctatttccatacattatctccatatggtccttggcttatctttgaagggagggtattgcatatatacatatacaaacttctctttgaccatatgcactagctcccctgggaaaagatgttcaggtctagaaatactatgttgtaggaagagcctatgtttaattttagtaactactaccttacaaatgcctgaaggaattgcaccaatcttttcttattagcaatttatgaggttgtgagtcatctggtaagttctaccattattgatttacttactatatgggttttggggcatgcacagaggtcagaggacaacacaggcctttcccttgtaccatgtaggcccttaggactgaactcgggtcatcaggcatggcagtaaatacccttaactgctgagccatcttcccaaccccactccccatcattcttataaaaatattttcccatctctatcctaatattgttttagtagctccccgcctctgcccctttcttcactctatggcttttgccaaatgttctacctctttgcttatgtctaaaactgaacccaccgttccaagtgtagactctctgacttcatagaacgtttgtattctacttcccaacaacctctctctgcacatggtaaacacatattttgcccagggctgaagtacaggcctcttatagcagcagaaagtcatcacatataaatgtatttgctgagattgatagtagaacctctacactggaagctacgatttgggatgtattttctttggtgaactcacttaccagtctcatgaatctcatgagcatatctgatttctcaaagatttaggatacctccttggcttactcacctattcccttagcaccatctcctcatcgcagctgatagcaaaaacaaggcagaggaggaggagccttcatctgtcagttggatcatgtctgctgtgtgtctccttgataagtctccacatcggactttccttctttaaaatgaaatcagtgagacacaatggcaaagaaaataatctcacatcactttcaacctcactatgggagtccattttcatatcctttgtggcagttaataagttccatcatccaaggccacttcccagaattccctactgttaacatgcctccacgcagagaatgccccatttaacctcacctttgtctccaagccagatattcaccatgacaaatctttcttctacttctatggtaactcaatattttggtagggaaacttataaaatgctttctaaatgtctagataaattttgtttcctggttttcctcgtcttcaacactcaccatcccctttgagtgttttccttattcattttctgttaaatataattataacatatggcctggggtggcccaggcgatatagatatttctcactcagtgtatattgaactgaaaagttcttcccaaactcatgactgcactcgttcagtgtagtaacattgaattgacctattcctttgtgcctgtcacctatttcagatgctggtccatctgtcacatttctcgtggctgtgacatattacccagtgaaggtggtttaatgatggagagtttattttgcctcaagcatttgagggtttgatgcagtgaggtgggggcacctctgactgtgctgtctgacagaaacatgaggccactagtctcatcacatgaaagtcaggaagcagagaagaaggctggtgtccagtgggaggtccccttttcattcggtctggaacccccgcccatgagggtgctaccgacattcagagggagtcttctacttcagttacacctctctggaaacagtctcacaggcatggtcagagtttgtcttctaggtgattctaatcctgtcaggtagatgatcatgctgaacaagaacacatatctttatacttgttattgtcactacaaaaaccaaatatcaaaactacttactatgttacttgtcatgcacagcttatgaatttgacattaccttatgaaagggttagtggaaaataagttgacaatggcaatcatatcagagactatatattttaaccatgtatttgaagttttggtgatgtgaaatccatgagtgaggtggagcctgactattgactagtcaatgtcagcctcagtcagctaggcacatacattcacactccatggcttaccctgttagaggccccttcgcctattcaaggatagtgtcactcaaagtcggcccccagctcctttggcaatatcacttttcttggccttatctatctatccaagtaatttccaattcagatcattcttataatcttacaatcttataattattctcataattcttgcaacaaaagcaggaatgttgaaagtttcctctctgttttacaattcagctaccaggaaaaggtctttaaagtcatctgagtttacatggtcagtgaaagatttcatcagaatgaacaagcagctagaagtcaattttgtttgacatagtgggcaactgtacttgacatactgttttaaattaatccaataggaaagacttcttggcgtgcactctaaaatgtagaagtttgacgtggcttcatcaagtaattaagttcaattggaaacattatttctttccttttaaattaatgttctattaaccacttagatatgtagaaaggggaggtcaagggagagaagaacaatggagaattcctggcacccagacattacatctggaaaaaaaaaggcacaagtggttctaacagtctgatccttggtccagaagcaccacgttcactcaggaacatattggtcaaatacaaggtctcagtctgaatcctagactccttgagttaaggcagggtataccattcaaatgatctgtgctttggcaagcatgaccctcatgcaatctaagctttcagacacacactcactaaggtgctgagcacaatataagtgatacattgctggagaggagccggcaactgcttcagaggcaggtgtggcaacagtgggctagagtgcttaggcaaagagtcacaattatatcatatatatcacctaaaggggggggggcatgctgaagaaagagactgggctgagcaaggcagtgatctgaggaaacatcaggagggcctggaggaagaaatggaaaggccaaaattgatataattctattttaattaaaatgcatacacataataaagtcaaaaggaaggggcagtttcaagggggagagaagtcactggctacaccaatgacttcttggctacccaagaaaatggggagaggatcagaagctgagataactagaagacacagaaatttgagaaactaagttaatagaatcaactgcatggcttttactctttgtggacagacgtttgtattgggccatttgagggcagcatgacaagtaaaggactccattgtaggcatgttgatttggagaagatgggagagcatgagagtagaagatttcataccgagtcaaaagcataatctagcaactgctccaagtgcagaaaaagagtgatgtgtgctgtgcttggcagccaacaaggcatacctactacccctcttggcagccaaggctcagagaggcagagagatggcaagaggctgaggttgggccaacctctgtaaccagtgcatctgaacacaatgggactgccacactcgtgagctcactgcagcttcagctacttacacaaggctgagcctggcaacattattttcatggaagagggaaaggtttttgtgcctctacctctccatgaaagactgatgacagttaatggtgctggaaggaagggtgccaccttcttcagcagtgtaaccactgtaggttaccattacccacactccagtaaataaccacttacctatgctcttgtgggcaactgtaactaaagacagcagagtccagtgcatagtgtctcagcctgagtctacttgtatagacctacaaataaaagcctacagcgctcaggatatgattccactaatgagtaatagttactctgatacctcctaaactggaggtgcttatcctagacacatagggtgaaaagatgaattggagcacaggtactcttacatgatactaaccaattctgtggttggattttatttggcattgtgttttgagttctatccggatagtcatacatacatatatattcactccattagtttatgtgtagctttgttttttgtgattatctttatagctctcatttctaaggtcatgccagataagtaccctcctagaaaatgaataaatttatcataagtagtgtaataaacaatatggaagcttcatacactgatttctaggtatgaatgtttgaacatagagcaacttttcaccctgcagagtctgtggctgaatgaggtttggtgccttaggctacccactctatttcaaagcccacttcagtgttagtcattcctcaatggcttttagttgaatgaatgaataaatgcatgaatgaatgaatgactctgatgaaagcattattatttttcatagatcatgttgtgagtatttaaatatttttttctaaaaccccgtggctggaatcaggactaacagtcaggggtttccaatactctgtccagtgttctttctattacacctttgaaagagctattgtaagagctctgttagggaaccaataggaaaggaataattattatgagttactaccctgatatagccaataaatggagcccatgtacctgtgtaattggagaaaattaacagccataagcagatctagggcttgagatttatcatgatcattgactgggtctgccttgtgacatgggctataaatgaggctcgtgttgtaaaggagatgtgtgagttatgcgggtgtgaggatggaggaatgagccagaaacagttccaatgattggaactgcttctgctaaggccatgggtgacctgattgccctgcctgtgtgtgtcccccactcctccaccttcaaccctgccttgcctcatgctcagcttgcttcttttaatctctcctagaagagtccttaaaaaggatagttgagctgaaccctgaaaaactctcaagcactcttagaagagagggcttaaggatttcattaggcacccaaacatcttgccaaccaccaccgagactggtgggaggggctggactcccaccgagattgattgatcttgactgtcaatttcgagtcctatcccagtttccccacttaaagaaaaatctgcctcttgattacctcctcaaaccctggatcccacacagatggagaagaaaagatggccacctagaacagctccgagtaggaacagagaatcctagttcccctgataaattggccaaacaagggattaggctaagccgatgagatacatgcattgcttgcttacttgcaaactgctgtcttagttatatgcttatgtattctctgtggtttattccatcagccgcatttagtaagggcttgttgaactaaagggttaactcaatttttgttgaatggaggcaagaaaccaactcagtgaccccaggggcctctttgttattgcctaagataggtcaccatacattttcttatatacccatagggaagttagagataccccatcggtccccatttctttggtaaaaattcaacattccagatgttctggaactgcccttggctcttctgtctcacattgtaatctggagacccatatttttagatctacaaacagaattcataaataggcaaagcatttctgtcctgctcacaaaacagtagggactgcagatttgtcttcaaaatattgtcatctgctggagatttcattgaattggatataatatgatagactttgtgaccagagtagtcttggatccttgggtttgtcagaagtaacctggggtattgtatcctcattcagacagatggaggaattaactatgatcagtgttcttgtagcaaatcacaagctggagtgtcggggagacccttgaactaactgcaagaacatggattttccatgaccattaactaagtagcagctacaaggacagccgcagcatttgttttgcttcctctgggtaagcctcctgtgaaagcacagaatatgatacaaagcttagtggataggtaacatttcagatgaggttggaggctggatgagtggaggaaagagctacactgggtacaattgcatcttgggaatctgtcagaagttttaacgtggaaggtagtgactcaaccgtgaggggatctgagagaaggagaaggaggcgcagtgcccgaggaagtagttgatgaaagagcatcgctttcaatgtgtgctgatgaaaagagagccctttctttagggtgagtccctgattccaattttacatttgtggagcaattagtagggctctgcttggccctccccggtcctgtctggtagaagaatgtctctgatatgtaatatttgttgtttgaaaagccaaagaaacgtgtttctttttctgagcctgccttactttttatgttctgaagttcactttggacctcggattttgctccaagcaataaaactggttggagagcgccagcataatggagctgtaattgtagccaactggtgggggcggggagagttaaggtgtgtcgtggtttctgtggtttctctgcagagtagaattccctgcaaagcttttccatgtggtgttttaatagctgccttaaaactctctgatgcatggagcaaaactgaattagactcatgtgctagatcgctgggatgggccaaggactctgaaaaatgaaacaaaacaaaaacaaaaacacaacaaaacaacaacaacaaccaatcaaccagcctaagccagaggctaaatctcccaaagaagatcctaaggatgtgtctgaagttagaaccacagaagcaagcatctcctctagcccatgtttgcagaactttctttggaaagccagcaacttccattgtaggtactgatcagatccttctgtacagtactcaataatgtacaaaatgaggctacattatttgtccatcagagtcccgcaccttcctttgaaggttgcattattgtgtctactattttttttttcagaatgaggaaacagagccttaaagattagcacaaggccatttgggtaaaagactgcaaggcagaactggatacctcttgagcaatgtgcccttcccttctggcagcacctcactaattttagagatcatgtttaacatttatgaagacaagagaaagcagccagccaatgagtgcacacacagtacagctatttgtaggctgctgagttctcattgctgagaatcagacattcacaactttgtcgagacatcaaaggggctcactctctctctctaactcagatctcagtgttcattccacagtgccaagagcagctgatagaatagcacacactcagtcagcctttccatgcctagcatgtgttaaagttctctttagtgtgtggttttggccacctagttcaagaagcatttatggaaaactgttatatggtaagtgtgtgggatgaatatgaagcagtctagatggcatgtcctagaaccttttctgttgcagaaaagaccaccattagcaaggcttcctctgaacgaatccgggaattctgggaatctttttttaatatgtgggtaccctgaagaaaaataaagtgttccaggcgatagaggcatggggtttatttacttatgtaattagcaaatcaacccttaagaccccgagtctaataggtggtaaacttcattacaccttgaaggcgtggtggagccagaattcagccccaggccagaaacttcactctctttccttttgttcttaagaactagccctgaatggacatctgtgttttatagagccacaaaaattaaccagcttaacgtgctgttccccctccaaacaatggacccatttgcacttttgaggcatagaaacagatttcacttgtagtgagaagttttctgggggacacctcttcactaaaaccaagtgcacacatccacagcttaaagctgcctcacttatctacagtgcattgtgttatattgtgttgtggttgtggttaatgttgcctaattaatttctgagagtttatacaatatccaaattgacagaaaggcacctcacgtcacagtctaatgttctctcccacaactcttgagagagacagagacagacagacagacagacagacagacagacagagagagagaaacctaggcactctcttccagggaaacaaattattttagagtcatgccatctttattattttcaaagagaaaattatcttacaaactatcattcaagtcaacacttgattttgacagtgctattattgatattctgatattgtttttccttgaatcaactataagttcactgtgcctgaagcatccatgttaggacaatgacatctaagagcagaagctccactccattaatattcatgatgtcagctatgcgtatttactgctagagaacggtctcagtagactcttttttttactcaatctttttagcaatccagagaggtaggtcttgttattgctgtctttcacttctacatggaaaacagcaatgttgggtcatttacccaggccctcaacagcttagtctgtcacagtttgaatcaaaccatgctatcttccaaaccaggactcttaatcacccaaggtgcaccagtgttcacctcgagaatgactgcagtgtgcaggagcctcttcacctgtcgaaggggctgctggaagtggcctcaatttgtagatactagggtgggaagagagagaggagtggacaggaggaaaggggagccaccagcttctctcacaggggttcctctgtatatagcttgtcctccacttaaaaatacataagattggtttatacctgggctaacatcagaaatatgtactcagcaatccatcctgccatgctgtaggatgctatgggagggagctgtaggtgatccatggcaataaactcccttgtactctcaattctttcttagagatggccatggcctctacaataaaaatgtcctctaagccagccttacacattcagctcatcctaaggtgctgctgggaaaataccaacagcctgcttccaggtagaacacccaactacagcactacctctgtggcagacacaaactccttgaagctcgactttgccaaagagagtggtggcccttggttcccgtgtacccctggataaagatgatagactaacatgagtgggaggtggtactgctgtcaggacaggtttaggccatgaagccctctactgaattctggtcctggtgtggtgagctgcttccttgggacatgccctctctcccactgtggcacttttacttgcttccacaatgactaaagcttacagaatttcagctccacagaacttgtggcctcttcatagcaggtgaatggaggaggagccaggacatcattttgatgagtatgggaaagaatgagaaggagggacgagagaaggactggctttggagttgatgccgttcatgagtcctgagcagtctacttcctcctacatcacatgcttacccgagttggtctcaggaaacgtgtatcaccaggtcccaaatccttgtaactgacccctggtagaactcacttcaggtcaaatccaatgtcttctgctcttggggactgaaggagtgcagaatgtgtaccccacagatacctagtgtgctactttctcacactttatgattccaagagtcaaagtcctcagagtgtccaaatgcatccccatgccttttttctttctattttctattgtgaaaacatgatagccaaatggtctgattcctaaataaggatccctcattgcagtacacactagtatatcaaactaagttttatgagaaattatgaaggctatgtaattagaagagggtctttgatacatacctgcttaataaggagagtcaggtaaagtcatgcatggtcattaatattgtacttgcttattgtacgacgtgtctaatattgaacctcaacttagtttacagttaaaaaattccttcttaacagatacaactgtagcagccagtttgaggtaatgaaaatatttcttctcctggccaaaagcccacactaacactcctccgctgatggagagccaagtcttcttttgaaaggaaaaaaaaaaaactagcatgagaaagacgttcacgaaccctgtccattcgatagtaggtggtaaatccacaggacaggaagaccttccttccagctgagcattgaccctttatattaaatggctctcggcaaactccagcttcttcagtgttgtgtggattttacttaggactcttatatgtctttttctaaggaaggttctcaggtcagttctgggtagaggtccacggacatctcctcccaaaacgtgctatagaaggccaccactaaagcagccttcctttgtccttcttgtatcagctgactgttcttgctaatggaaggaagaaatcacagacccattgaccaaaggctgtgtcccacttgctagtgaaagagttgttataatcacattagaatatggaatgcctagtgaaatttggagaatttttaatatatgaaagaaaaatagttctaaatctaccccatgtctgtgagactggagactctctgagctagccaagcctccctgcatgtaccgaatgctttcttgccttagagactacatgtaagtgtttgggttgagacgccctcctgccgggcttcaaattaggtaagactggttcagcaaatagaaggtaatgggttgtgtccatacatggtttcgttccacctttgaccaactttatcaatcacacagcattatctgtgtcacatatgtctccaggtagcagagagccaccatcattgtcagatgttggggtgagccagaaaaaaaaaacaaagtcccctccctcaccactgaatagatacagccactgtgtttcctgaagtggacagttttcattctcagctcttgtaaagtacactcaagcttcccaaactgtccaactcacctacaggtaggaatagtaccactaccgtacgtactcacaagcctgtgctcttggctgtgacatggcactgccatctccctctctcaaggccagtattcattcttactatatcatatttctctgacttcctcgtgagcttaaatctaaggactctgtttaactgtatgctgaagtggaagtgggatttaagtggaggttttttgttttttggtttttttggtttttttttttaaacagcattttcccaaattgtgtttgtgtcccattttttttctaaaacaatgtcctatttttaaagcagttgttgttggtagagatttggaacctgcagttttcctggaatgctaacagaaagacccagaagtatagtttagagcctcctttattgaggtgtcctccactcctccttcatccagcagtgtgcatgcatttcctagcatcccgctgccccctgctgcagaaaggagtttgtgcagccttccctgcaagccttccctggtggccttggtcactacatctcaggccactctatctcaggtttcctggggcccagtccatctcattagactgaaactgcagctctaagaacatccttcgtggatcctgcttcacaggacagaaccaatgaggaggcagctttttaaggcccagtgtttgagtggaaacggggccatgggtagacttcttagaccctcttaaatggggagagtgtctctgctctagcttaaatgaactctctcagtatgacatcagggacacctcaagattcagcaattaggaggaccatggattgaagaaaataaagaaagaacttgtttgtttttaaagcccagagcactgaacttctgaagagggaaatgtggaggattgccttcacctctcaccctctgtaagataccattttaaaaagtgtgatttacagtgttttaagggttgaatataagtcatttctgaaggcaccatatacttttacaagtatcgtaaatttcatcaattagtaacatattgttaatatcactctgactctagtgacttgctctcagaactgtcctgaaacaatcaggtttgtcagctttcagtataatcgtgagatggttttctgccaaaattatcttaatcaaggtgttgaccttctgggcctgcctttccatctaaagtatagcagtgtgcctatttcacggagtcacttagggtgcagggtaacatgtgcccggcacatggcagatccacagtaactgttagttccttcctccgcatcccctctttcttcttgtctggaatggtcaacatctgcctttgacactggattctaatgggtaggtaggctacagcaccctcttctggaattgcctttaaaagagctgagagacaaacctttgtcaccattagatttcaaggattggcaaagaaacgtgcagggagaagggggcagtgggagcagtttttattgctgaaactttaacacaccgcctaccatgagcaatgaatacttttccatgagaacggaagagactttcctccttcagctctctctatagatgcagctataatgggaggggtaaaagcggtacccagtgcaaagagggtcagtttgtggcaatagaatccttttctaaacaatttgttttatatatatattatttttcatccaaaaagattgttttaaacttaataccagagtttaaaacaaaggcatgcctacctccatgcatgcaaacttagcacataaggaaagcatacagttttctatttccatgtgtggttatgtcctcccaataacactgaacactgggtggatcttgttatatagtaagtttccatggagaaacactgcagatagcaacactgcagacagcagcactgcagacagcaacactgcagacagcaacactgtagacagcaacactgcaggcagcaacactgtagacagctcctatttgatggcaaggaagaatggaccctgtgcccctcctctcacctggattctgctctgacacccgcctgattatgagcaaagcaaagtacaaaagagcctcacaaaattacacaacaacaacaacaacaacaacaacaacaacaacaaaacttcatgaagacttcaggtcttttggcagctgcccaaagtaggatttactccattgatgtcaggcctctagcggtagctccagctagcagttctcaaccttcctaattcctaattcctcctcctaaatgctatgaccctttaatacacttcctcatgctgtggtgaccccaaccataaaattactttcgttgctccttcataactgtaattttgctactcttatgacttggaatgtaaatatctgtgttttctgatggtcttgggtaacccctgggaaagtgtcatttgaccccacaaggggttgcgccccacaggttgagaaccagtgagctagcaaatagcttagatattgctatgcccagctatcttattttgcacaggaggtcattgaggcctggtggggtcatgtggctcgggtgcctttccttattttcatctttctttccatggtgtctttgttatgggtgctacctcccccttgagactgtttctgttcagaaacagaaacccgccttcttgcaaacaccaggaggtggagagggataggagtaaatgcacaaagcccctcctccatcttccagggatttaccttctccagtagaaattataagagacggagataaaagaatcaaccactggatgagatccttgccctcagttacttgtttctttaaattgtgtgagacaaaattccatgttcaagaataatattttacccatcttcccagatgtgggaagaatccttctgtgaattagcagtctcacttgtgttacagtagtaggagaagatgtttgctggttctcactagcaactcgctcagtcttacccaacatttaccaattactctttgaatttcttataaatgtaacactagagtagctgtctaaagagaggatcaggaaatgaaacaatggctagttactgttttgagacttatttttaatatacatttgtggcatatgaatcatatattgattgcaaatgcaaacttggggggaggggcagcattttactgggatgtaaaccttcagaaccggtatttcccggtttcttaagaaaactggttgcagtcaagttgcatgaaatttggcacaattctgccgccttgtggctgctttgataaatctctcatgtagtccaaggtcagttctgcctttgagtaaaataggaaacatatcctggttttcagttcagtgcctttgacacaaagctacccagtgaagaccacttagccgctacctctgtctgctcttgtaacagaatgattggaaggcctccatcgccttcgtggttgggaaccgagttgaggatgatcttctcattcatgcccttgacctggctgttcgactccctcagcggaaactcttcagtattgtgtcatgggaagacattctgcagcaggtacctgtctgtccctttctgcctcgggacatccaaagtcatccatccttccttatatttgtggattgaaatgttagaataggcaacagtgaacaaagtagtcctggactacttggttatttgtgatgggttactttaagtgcgcaaacccaatgtaaaatgttgcatttggaagggctaaccttctcatcaatgcagtccattggaacttcatcccattgacaaagatttctgtaaacagtccaggcaccaggcaaaggtctctgaggaattatttagtacggagttagataataatgaaagagtaggctaaataaggcacatgactaattgaaaaaacgatatctatagaaaatccaagctggctcaagtcagagggcaatgcagatagtggagaagagctgtcaggtggcacaaacatgtgcgagtaccagcaccctgacgagagaggttataaatactacatctactgtcttgctaagttccctagtggcttaatttaattcactaattcactaatgtattagaaagtttcacagatctgtgtgtccctttaatctttcattcattacaagttaactcaacgtttttgcagatggatgaaatacagtcacttgctgaaagtgcttcagctaaaaaggggaaaaagcccacatctgtcaatttaccgttacattacgaggtgagtaactgagtctgtcaaagagacttttgtaacgttcagccatggaaactgaagtccatatgacactttaaaaaattttaattcaatttttaaaagtaaatttccactatccattgattgtttgttcctcatatacacagacacatacacactccacaactatacctttaagaatagacctacctagattatttacactatccttcttcccaattgaaaagcatgaatcatgggtacttaccaaaacactaggttgtactttcctgggataagtactgaatatgtgatggtattaaagagaggcattattagtgttatctccttgatagaaagaggaaagaaagagcgtagtctgaccaagtttcagtgtagttgttggtagttgagaatactgcaaatggcttggcattaatccttgacacaccgctctctatgttttggcaaactaactctgctagcagtcaaattccacacctcccatcattccttgcaatgttctgaatgtgtgctcaccagttgaaacattatgtgatacctggatttaaaatagtgggttgtttttttttttttttttccccttctgaagtggtcaaggaaatccatgtccaagtatcaggcctgggatcaattagaccccccaaaggattctttcttcttcaaagatacccagtaaaacacagagatgataacagggcagttttgacgtttaatctggacaggcattttgacttggatgtgggatagcacaatgctacaaatccagggtttgtttagaaagccatccttcttcaacatgtgctagggctcttggttgcatattcttcactcaggggaggtccctctcacatctggctcccccacattcttccactggagcatttgggcaagaagcctcccacacttggttttctgaatggttccagaaggaaaaaaaaaaagcagggtggagcaccacagagatcgggccttagaggcaccagaaattcattaccatcaatcactggaagaagaatgacaaagagcataaagcaagcacaggctcctggtcagcactggcccaggacaggtcacatctggagagagatacatttgcatttctcatctcacaactgaaaagacttgatcagtgcctgggggtttggggggccaggaaatgtaagttgccatagaagaggctcagaagcaagagtcttctggagcctctggacatttgagccaagcggacagcctgctcttgagtccttttctgcatgcaaggtatgtagcaaataggaaatctctacagacaagctccgtagacgtaattaggaagtcttgcatttcctattccaaggaaacttggccattgggaaaagtgagagtatagtaaagtaacttggcctcgggggagttcgtgagccttgttttcttctagctctccattttggatgaagagcttaaaattatcatgaagacaataaatgtagttacatattcatttctacttgtaggagattctccttgactttaaaccagagtctcctctttcttgctttaaacagagttaacctgtgtgactccctagtttgttagcttgtgtttggttagtagccacagttaaaacaagaccccattacagtgatgtttatccatgagcagtagatcaggtcagaaccatattacatatttccagtggagactcgccatgtctgtcctagcaaagcccacattcctgagtgattcgctcaaggtttcatttgaatggtttggtgttatatacacacagactcatttaaaattgtgcaatttcccctgaaatgttggaatttcatctagccatgatattgtatacatggccatctttatttataagccatagtcctttgaaagcctacttagttttctccgccagaggtatccctgcaattcctctgtccattcaccttcttgctttgaaaaccatgtcctgatccccaagtaccactccaggcattcatccaggaatgtgaagagaatagtctccatcatgtatagtctcgggagtgctagagcggttattgttctcaccacccactactgaggatggagatgatcgtttgtcctgagcatagcagcatccccatacccggagctatttaaggatatggatgcacatgaaagtgggtttatacactgttaagtttggccaaatactggcattgtacaaccattatctggacagtgcacgaggggacagaaatgtggatattcttggagcttaagaagcattaggattatagacaaaataaacagtaaacatataaaactaggctagcgtgcagtgggtattcatcagacactcattaaaagaatagataacaggggcaggaaataatcagtggggtccggaagagacaggggagtgtccagagagctaaaggaaaaagagtttagcattagttagggcatgggagaagagattagcattagctaaggtgtgggagaggagccagagaagttctgaagagacaactggcacctgcagagaaagagaaggggtcgtggacattttgatctgtataagaacaaaacaaaacaagaagaaaagttacctcacatcccaatctaaaaggaaatataaaaactacccatttcatacatggggaacctgtgttaggaagtcttgtaactagaagatctagagttagaagctgaaataccttagattgtgccacaggtaaatacacagcttcaagttttcctattttatcatggaccctttcatttgcctcaatgctgactaatgtgggagggtatgtcctgacgttcaaacgtagaaaagggaattttagggaaagagcagataaaacagagctacgggaactagagtggtctctgtgagcgtgagggaaatctcaatgagtatgagaaaagtctcagtgaatgtgggataggtcccaatgaataggcactaaacttgtagctccacaatacaataaacactagctaggaaaggataaatcctggatgtgacactctaaacctgtgaagatggagatctgcaagaaagcactttttaaggtcttgggtgatggctcagcagttaagagcaccaacaggtctttgagaggagctgagttcaattctcagcacccacacagctgctcacaaccttgtgtaactgtacttccagggaattaatgtcctcatctggctgccaagggaagcagggatgtccatggtgtgtgtgtgtgtgtgtgtgtgtgtgtgtgcatgcatgcaagcaaaacacctatgtagggaatgaaagaaggagggaggaaaggagagagggagggaggaaagggaggcagagtgagagaatgagaattttaatacccaggaagtatgctctttagattccaactgaaggtgcatttgctgagtgcacacatccaggtctttttatgtgcatctatgcttcatgacccaagtggagaatatatacgcttttttcttttgcaaatataccgagtcctgactgcaaattaaaaggaaactattgccagtcattccagatcaactcaaatgtcttaaggtctgtgtgtgcctaagtctaagttcttacacatgcaaatctgatgcacaatgggtgaacatcttaatactgatgcacaaatttcaaacttgatgtaatgactgaaaaacgaggaagacaaagccagggtgagacagtgattatttctacagtacaatcaactcagagtttcctatcctaaacatcttttttttttaattttttattggttattttgcttatttacatttcaaatgttatcccccttcctagttttctctacgacccacccgcatcctaaagatcttaagttacacactacaagcattttcattttgtgacagcagctgcctctcctgcccagctggacatgagctgaggttggaatggctatccatggcttccttagcaaagacatattcggttcttaaaacactggttaaaaaaaaaaagcactaaaacaaaattgtatataaaggggatttataccctatttgttgaatcaattttcaatttctatacaataaaaccagggataatcctagcaactacatgatgctctgcatgttgtgcctgtgaggaaatattaatttctctcatcagtaaaaaaaagtaataataatttactttttaacaatttcagactttttttgttgttgtttttgtttatcaagaaagggtttctctgtgtcactctgactgtcctgaaacttgctttataaaccaggctgaccctgaactcagagattcacctgtctcagcctcctgaatgccggaaataaaaggcgtgcaccaccatgcctggctcaattaggtttgttgttgtttttccaaataaaagtatttttatgtttttttttaagactaaacttgaaaaaatgatggcattagtttcaaaaataacataccaagtactgtctaagaagatgagggaaaggtagagagatgggtcagggcttagagcagcttctcattccccagagtggctagcgtgtgtctcccacctgcctgccaagcagctcacaacaatgctagctccaggggatccgacaccttcttctggcctctgtagtcagtgacacacatgtaggatacacacacacactctcgcgcgcgcgcacacacacacacacacacacacacacacacacgcatgcacacacgcatacacaaccaacataagcacataaataagagtaactataaaaagaaggtgagggatccaaatgctctgtcttcaggtctcatgttgtccatttttaagacattgctgctgcattggttacaatgtcctgatggatcaaatactcccgggttttgatcctcagctcctggatgcgaggacatatttctcagacttgccccaacaaggtctcaagagtcgtttccaagaatgtagattgttacagagcagtaggctgctatgttctggattcctagcttgcaagtcattccttacactgtgcttcaggtaagcagtccatgcagtaaccatataagcctttatattggaggtgaccttgtcaaaataaaaaaattgacagatgcttcaaatataggaacaaatactacgtgaaattttaagaggtttgatattattaaaatggcagctgttctgagaccagaaggagcagtatgtcatgaaagcaacaaggaaaggggcagggtgggggcaggaagagttccctggccttttcagtcctgagttttaaagcaaaacaaaaacattctggaagacctggagagaagccaagctaatgccgttattccatggagcttagggacccaccaggaaattacaggccagttagtttaacttcacttgtagggaaagtattaaagactgcagcaggagatggagtgggaagctgctcagtgagctagggcatgattatggcaagcctggatggccatgtcctaggaacttgttgaaatgctttgaagctattacagccagtacaaccttcaaaggatacagtggagcccagaatctgtgcatccttccagccctcctgggacacctatagaatatggcccaagtacagtctccaggtccagacctctaaagccactatgaaaaaagggagaaaataaccactgggtagaaacattttgaaaactggaaccaattaatacagcttgatatttataaatgtaaaataatgagacttggaatcaaatgtaggaatattgagctgtaacaaagaagtaccaccttgggactataaaaaaatcaccctaggagttatagcatcgaaatttggctttggatctgacattcgaccaaaaaataaaagatgtggagagaaagtgtgcaaggaaatcttcacctagtagaaggttatgaagaattgcaaccaagtgaactttgtcaagttgatacaaagagcagtccaatgaacttggggcctcatatgctgaaggatgccagagcagctcaggagaaaaagacctgctgggcaggaccaagctgggcaaggaactgtggaaggtcagggctccattgcattaggaatgcacttctcgggggggggggggagttcagatttaagacctgcagttctatttttaaggaaaagcaccactcagacaaaggtgtccacaaaccccccattgctggccagctctcctccaccctaactttcaggcaactaaccacaactacatggcaaacagtcatcagtcccgaggaatgaggtggacatggttagcgccaagaaacttgagggtcaactgcaggctgactggccattttgtttggagagtagtcaagacagggatccagtcaatatttttaagatatgagtgtcagtggaggatcagctacaaaaaaaaaaaaaaaaagcaagattctgctggacatatgtggcctctctaacagtctatacagcattggtgcttaaatttttcaaaacctactctaataagggttcttaaatgcttcaacctctcttctagcccatcacccaccaaaagtagtggaaaagaaagagtaacagaaaacaggggttatagacctgtttagaaatagttcattggggctattcatcagtccagttcatgaggcaatcactactcacaaatcagcaatggctattccannnnnnnnnnnnnnnnnnnncctagaagaaaccatgaggttccatcaattggctggagtccacagaaagagcaagaagccaccagtatatcatgagaagttttttttggcgagttaccttctaggaagtcacaacaagcaaagattagccacaaggatacaaggcaaagactaatgaggcagaacagggtgaaccaatgtcagaacctcatcccactgtctatggggtcagatttatattctttgtgaacatcatatgtcctttcatgtgtctgcctcagcaaaacatcctttcacatatctgcttcagtaaaacatcttctctcctgtatctgcttcagcaaaacattcttttacgtgtctgtgtcaaccatctttctcatgtctgcttgagcaaaacatcctttcacctgtgtctgcttgaccaaaacatcctttcagctgtctgacccagcaaaacattatacgacataagtaagtttccaaataaaccagaaatttccacttcagtccacagccctagagttcatcagatagatgctgcagaaggcatcagaaaaactgttttatgtctgtagttaataagactgaataatccacatttgtcaagagtggtaatatctagcatttcatccgccccaagctttgtatgaattggcttagaccctaatcctatcatctacctatcagaagatacgtataggtcaattaatataggtcaattaatgaccgcataggttgagtaatttgttgacttcaatgacactcctccttttacctatatcacatgtgacagaaaacagttaaaaatctggaagcacttgtgaattaacagtgtcataaatagataacgctagtcaattagaattaaagtttaaatctcttggtagctatctgttttgttttgttttgttttgtttttcattcttcctttgactcaaggaaaacacaaagaaaggataaccacagtaaaaccacgcgataggtttagctgcatatttgggctagtctgatgagttccttttgcccaaaatgtttggggcaacagggatctttcatttctgtaattaagatttacataattatggtaactgcagttcacatccaactcagttgaaaattgaaaggccagggttctgtctgaaatgccaagccattggagagagctacatcctccatttttgacttggtaagacacagacacactgagcagacacactagtcaatccgacggcctgggttcagccttctctctagggcttaccagacctgtaaccttaccctgcacctggagttttccctctatgaagcctgtaactaagaacgttgacctgtggctgtgactaaataagacagtgaatagaaaacacttggtacctggcattgagtaaatatccatgaaagctagtgattattaatacttttaaaacaatttctattgtcaatcaaaccaaatgctgttatcttgcagtatagggatcataaaaatactagaaaggcaaccacaagtcttttttggaagttaaaatatttttgcttcattaaatatttattatttcaacatgtgtcagaaataaaattaaacaccaggatgatggttctatgggcaagattacttgttgcacaagcatgaggaccagagttcaaatccccaacctcactataaaaacccaggtgtggacacatgtacacctataactccagaattccaggaggggaagagacaacaggtttgttgggaccaaattgcagccagcctatctccaggttcagttaaagaccctgtctaagggaataagatggggagtgagacaacaggacacctgacattctcttctgctctctacatatgtgcacacataagtagagatatgtgtgatacatcacacactcacatacagataaaaatgttaactaaatcaataagactaccagcctgaaattttctcagctttatagcctagactaggcctacattgtttcttaaaacatgatttatacttgacttaaacagaggtaatatgttggtcctgcaggaggcatacagctttggctaaagaatccaatcaattctcatcattaaaatacagaaaatgttgaattttccatgcattccacatatatgtgatggtctattaagaaccaaatctatggttgtgtatatggttgtatatacggtgaataaaacagatataatgccctaccctcaagagtttgctatatctgaatatgagctgcaggcattaagcaaaaacaaacaagcaaataaaactgatgtgtaaacaattatgtactgaggtaattaggtatttttaattggagttaattaaaggagaaaatactgtagatgaagaagaactagttaatgttgctgtgaagaaatatctgaatatgtgaactttatgaaaagggacatttatctgacttattattctggcaaccagaaggtctaatcagcatcatactgacattttccttgaaagctctcacacactgcatcatagcatggccctgaagcagaaaggaaatcagccatgtgaagaatgagcatgtatgttcaagtgatgttggtgagggagcaggagaggcattcttctgtaacaacgtatgtttgagagacttccctggaaagcaagaaatgactctagggaggaagcagcatttccaagccaatagatagcatttcctatgagtaccaacatcttaagagtctctgtgattctcagtactaccacaatgggacagaacttccagctcgtgaacctttggggagccagccacagccagacatcaacagatacaaacaaaaagagaaaacgaactgatagaaaacaccagaggaaacactcaggcacagggaacattatgttaaacaatgtggtggggatagaaaactgttagagaaataaagaggacagtgtgtccaggacatggagaagggctgtcttaggaacaaactcacatctttacccaatagaaaaagaaacggtgttaagattttggaaagcagatgttctgagaacgttttctggttgctgagtatgcatgtatgtaagggtgtgcacctgcatgcaatcccacacgtgtgtgctgcgacacgcgtgcggtggtcagaagacaactctcaagagttggttctgtcttcctaccatatgggtcctgggtcctgaactcgagttgtcaggtttatgacaggcatattttacttgctgagccatcttgccagctcaacaacacttttccaataaatataagtgactttttaatccaatagccaactcttctaccctgtgtctatgtttggtttggcacttcttccttcccttgtaaccgaagatggagtgaagagtggggattgggggactagaggtcacactccagattcacagaagcatgagaattgctaccacagttcagttgcagctgtgcattgtctctcaaccaggcaataggtcctttggtacccgtgctgcatcttggacagttttggtgtgggtcctacccctgcttatccactgtctggggaccactgccctttggctggaagttaggtacaataatgaggtcgaccacaagctcgatgaagaacagactcaattagaaccagggtttaaacacaaaatgtttatacctggcttcctacgaggtattaaaatcttacagaatgacagaaaacaagcgcactgttgacacagctattaagtatgagctcaggagggaggagatcgtgtctacctcagttctgtttctgttgccctgcacatggtaggaactctgtatgagggttaggctgcttgaggattaggctggatgaatgggtacctgctatagtctccagtctgcgcttaggtgagactgggggaggagcatgcaaaaggacaaatatacggaagatgatatagactctaggccactgcccctttagactttgttcacctctatagcaaaagttataactatagcaaaaaaagttttattttaacaaaagttttcattgtgtatcacttgcaaaagccgggttgtcaaccccagctacaaaaccatcaaatatgcagccaataaagcaagctgcaaagagaggggctcctgagtcatggttgtgagtatagcccacgatggattcctggtcgctaacaggaggtgacattagttttaattagaatgttaattcttattcataactgactgagcaaggcacaggggaagaaaaagatttcaaagacactggaaaaacaactgactttctttttgacctctctcatcccatatctccaagacatatcagacttaacctactctaaaccatgtttccagcccttccccaggtttagcctcctgttgaagtgctctgtagcatgaagtatgcttttcagcttcttgaggcagaactgcagggtcatgcctgactcttttcctcattgcttacagcaaattagcagccatcttccaagttggcttcctgcatacctcctgaacttgtgtgtttgccatcttctctagcctctacaggcttacccagttctttgctttctacttaaatatttttaaatgcactgcaaatattagagacactgaatgcatcttacacaaaaatatgcttgaattcatttatccatttgacccacacaaataaccacaaaaatactctcggtggggctggagaaatggctcagtggttcagagtactctgttattccagaggactgatccccagcacctacatcctggcatacaaccatctataactccagttccagaggagcaagtgctctcttctggcctccatgagcaccagacatgtacttggtatgcaggaatgcatgcaggcaaaacaatcatgtactgaaaataaattttaaaaagaccactcaataccagatcaggttcccttctatgcacacccgaccccctccccatcctctttccctcccggtctctccctcccacccttgagattgctttattctccctcctaagtgggactgaggcatcctcacttggggccttcagcttgttgacttttttgagttctgtggactgtatcttggcttacctcactcaagatgatattttctagttccattcattggcctgcaaagttcaggatgtcctcattcctaatggctgagtagtattccattgtgtaaatgagccacattttctgtatccattcttctgccatgggacatctgggttgtttccagcttctggctatcacaaacaaggccacgatgaacataatgggacatgtgcccctctggcatggtagggcatcttttgagtatattcccaagaatggtatttctggatctttaggtagatctgtttccaattttctgaggaatctccagattgatttccagagtggttgtaccagtggattaccagtttgcaatcccaccagcaatggtgaagtgttcctatttctccacatccttgccaacatgtattgtcacctgaaggagaaaaaaaaaagatcactcaaaccatatttgtagcattataatataaaggaactataacattatctctatgttatatcaaatataagaatataaaaatataattatggctttagcatcttgcaacataggaaatcaattctataaaaatcttatgcataaaaactgaaattctttcagacaggaacaattatgggtcagagatgtaactatggaatggtaaccccatccctcacttgatgccctgtcttcctgctggaggtgggctctataagttcactctccctactgtcagacatttcatctaaggtccctccctttgattcctgaggtctctggtgcattctggagcatccctcccccaacctcctatttcctaaggttgcctgtttccattctttctgctggccctcagggcttcagtccttttccctcacccaataccagatcaggttcccctctcccccaacccgacttcccccaccccctgtccactttccttcccaggtctctgacccataattgttcctgtctgaaagaattacatggatgggaatgaagagaggagcctgagaaaaagaaggtccaacgacaggcccaatgtgggatccagctcaaggggaggtcccaaggcctgacactattactgaggctatggagttctcacaataaggaacctatcttgactgccttctgaaagacgcaacaagcagctgaaagagccagatgcagatattcgcacccaaccaatggacagaagcagctgacccctgaattagggaagactgaaagaagctgaggagaagggcgatcctgtaagagaatcagcagtctcagttaatctggacccccgacatctctcaaacattggaccaccaaactgcatacactaccaaacaacatacaccagatgatatgaggcccccaacacacatacagtagaggacttccaggtctgtgttcattcagaaatgatgcacctaaccctcaagagactggaggccccaggttgcttagaggtcaggtggggtcgggggtgggggcatccacatggagataggggggtgaggaggaggtataggatgtggagcagtgggaggatggataacgggtgcagggaatggaatatggagtgtaaaaaataaattaatttttaaaaagttatataaatatatatttgttataaaaaaaaacctaaaattgtttaaaattcatgtttcaacctcatccttatttggaggctgtttggaagttatccgactcttacagtgagccaggctatcaggaagcctgcagagccccatggccttgtgctccttaacccgtctaagcacaccatgtactctcgttgtcaggagtaacccgagatactcagcacccacctaggattgtacacggctgtcaagagaccattcctcagattacacttgtatggggacatctaattatttcagccaatccaaaggcctgcttttatcctttcagtcctcactagagccacagaggagtatgtcaggggacaaaaaggtgtgacacagtcccaagtcacaccaagtcctacatcctttgtgagaagctgatcttgtatttcatgctctcaggttcaatttagaatgtcagggagcagggagagagaccctatctggatttgatgcaagggactaatatattaccttttgtaactaataaaatttcagaggccaacagcaaatttctgatttgcttttcctccagtaaaatgtctgctttgaattatgcagaaagaattcttcttgccaacttgtttcaatttcccacacaaaaccatcacagaacactgtcaggggcttcctatagtggcttattttaggattcttcagccattggagaaacacaggagcacacacacacacacacacacacacacacacacactttgccctttccttgcagaatacagaggaaaatgtgttgttgaggcttttgtatggtgctttccttttccaaaggctgggatgagtattactcttcagactcagaaaagaaactcagtcttgccagaatcccattttatgaatgcaggcccgccctgcacggaggtggagaggccatcgctgtgtgatgtgatttaagaggtgctggatattctgcctgtccaaaaatagcccccacacccgcctgttgagctcagacaaactgtccataaaaccctactttaaatgaaatgaacctgcagttctggaatgttagcccattacatccgctatgctttcagcatgtatttatgcttcgggaggaaagctagctctctcaaggggctatgcatgtgccccagtggtgtgagaagagttagcaagacagagggttaaggtagcactgtaagccaacggaagcagtgtcagcacattgccgtggtgggagcatgttaaagcgcaattcagtgtctcccatgtccattcactcagtattttttaaaacagtgttttctgaaccaaatagtcaatgatcttggatgaaatcatcaagaatacaataataagggctagagagatggctcagtgattaagcacactggctgctcttccagaggacccaagttcaattcccagtacactcacagaacctgaaaatcatccgtgattccagttcctgggaatctgatgcccttacctgaatttcactgcatgcatgtggtgtacagacatagattcaggcaagcattcgttacatgtaaaataaaaatgaatacttaagaagctctggaactatgtattgggaatggttgtacaattgtatgaatgcaaatggaaatttttattttcagccataacataaaggaaagggttagagggttttttttttcttgttttctttttaaccattaaaggaaaaatgccaaacacagaaacatgagtcgggttttcctatctatcattcatgtgattcctttaaaaggtgtgtgtgttggggggcgggggggatctctcacatagaatactgaccaccttgcataaacttataagcccaaataagcaggggaaagaaaactgtaaaacggcagacatcgactttaaatacctctagaatcacttgaaacttggggtactgagaagagaaaaggtggggttggtcttgatcaggtattgtgacacgactgtgagatccggggcccctcccaaaacagacctgcttcactctatagccaagcacaccacctacatcatcatgtgggtgttaccagcaatgcttgtttatttcactctttgtttatttgtttgtttgcttgtttcaggggaagggtctcactatatagtcctggctgctctggaactcacgatgtagactaggatagtcttgaactaatagaaatctcagcttcctgggtgttgggattaaaagcatgtgctaccgcacccaatccattttttcttttctttttttcaaaaaatattatttaataccaagacagttaaaatcagaggctgcccagaatttgatagataacttttatccataagtattgtttgtctcccagcacttgcagaacaattacataggcaatatggcatcagtgaatatgtactgaccaaatggaagttgtcgcaaaaggccgctgtgccccaaacttcacagtctgcacacagtaacatcatatccacaacctgaagaaatggcgagccgtagttttcacctcatcagacaaagatacattcacaagcacagtgcttccagttcaaagacacaccaggactcttgtgtggtttaggttgtgagggtttaaactgtcaccactgacgccaagaacttcagtccatttaacattgccaccgccaagccttcaacaacttgatcagaaaacgagacaagcattaaatgaacagaggagcttcagaaggggactgtgggggtggggaacacagagatcaagagtgatgacagcagaaaagcaacttgtagcagctccagcggggaccctcagaactctggggcagggaagagagagacagagatagagacacagagagacagagacaaagagggacagagagagacagagaggggggagatagtgcttacgagaggaagcatgtgcgcacccaggcatacttacttgctgaactagtgaagtagcacaacttactaccctaggcttcctgcaaggctgatctgggaaagggagtaggcgtggctgcatgtcagcaggcatcaggcatagggtgcccttttatagggcacaggctgctgagtatctctaggagatgttcatgctacttcttaaacccagcatgtgttttattggttgcttatgctattggttgcttaccatgtgttgacacaaagctagcaccagcctttaagttccttgtaatctaatgaaaaatggatagaaatgagcgagctttttactacttgataagcaagaagttgttagtgacacagagagtacacagaacactgcctatgtctttcttaagttttgacagaaagggctaagaaaatgtgttgaaattggagtggacaacttatgaagtaatgctaaaggaattcttagcaatcaagcaaacagaacaaagtattccaaacagtgggctttcctggcactgtaggagggcaagtggaaagcacagccctgggagctcagcaggtggatgcaggctgggttataaaggagctctactgtactctgctataatgtgctgcacaaaatttaggcctgagaaatacagaggatctaggagcatgggagggcctctctgggcagtgacactggatggaggtgcaggaattttgtgggaggttggaagggtagcaccatcaacagtgtttaaatatggtatagtattttagttgtatgtgtatgttgtaaactattttaatataatagcaatataatttagttataaaaattatagataatttggaaaatacagtaaaaccataggtcatatactgaaagatacttaaatatatctgaaatactatactgcgtggagccctatatctcttttcaaaaatggaaattatatgttttctattttttccatgcgttataatgttaagtgttgtctaaatccatattcgggatgtgtgatggaaagtatgcttctattcaggaacatatttaactcctcacatctctgctaaatttatactgtttaccaatacttataattgtttccttatgagagttttcataaactggaaattccaggtcaaagtctacaaatctttccaatctcttgacacatattgtcaaaatgcaccagaggtaatttgagccaattcacattctttataacaattccaatataacctcgccctcttcaacactaaatttctaactctcaatttgataaacaaactattatgcagttggatatgtgaccatatttttattgatcatgtcttttgaaaaagtatggaatttatcagtgtgattttgttctcagactctctgagataaggggataccccaccaactgttggaattcaggatggggaatgttggctttaagtaatttcaaagcaaacttcaagtgctatgagagatacaaaaaggttatccagcccaatgtagcctcacagcatacttcaagatgagcagacacacagaactactaaaatttcagctgcaggagtggacacaaaagaaatacaactgagacctccatcaataggactagggacagcaatctcaggattgggagtgtgggaagggtggcatgctctttgctttgagcttctccatttctatcatctcacctcctgctgccagcagctctgatgtggcattctttgacatcgtctggaggacctgttaaaggtgctgaatccagtccagaccccagtgatgggcactacctgagatcccactgtgcacagagcttcttcgtctccaaccacatacacagagttgggaatgcttctcaatacatggatgatctgaaaaagtccaactggggacaaattgttcttttgtaccacgttaatgcgttaccaagagcatctccatgttggcagctcgatagatagaagggaacagggccaggaccacacataaggataggtcagccactggacaaggctctgtgtgtatgtgtacagcacaacagtatccgctctggagaacccctgttaaccccaggctaactgggaaagccaggtggcaagatggggagatacacatctcatttgatgcatccaacaattattgcctaaccatctctacttgcagctttgaatttttatcagtggaaaaataagagagaaaaggtcagtgctttcctgaagtttgctactgaactgtggacaagtggaaaagacagaggctgtggagagaaacagagcaagagcaggacatggaaggagtgggcagtgatggcaaaggcgagtggtgatgtttggagtctacggagatgcctgtgtggtgatcaaggaaaggagtggccctaacaggaggggcgatgagtgtgagggccctgaggtctgagcaccaaaaaggaagtgcaactggaaaagatcccagggaagaaatgcaatgggaacacacctggagccatgagcgggtcttggaagggagccttggttagacataggcatgctggtttgagcctagctagcaaataagattttgctctttaaaaaacattgtgtcataattcagcccaagaatggtgtgtgtgtgagagagagagagagtgtgtgtgtgtgatgaaaagatgtatcagcagtaaaagtcaattactgcttgtcctggttggctttgttaaattaaaacaagctaaagttattttgttaaagaatttcagttgagaaatgcctgtatcagattgcctgtaagcaaatctgtgcattttcttgattagtgattgatgggtgtgagaccagcctactgtaagtagtgcctggcctaggcactggtcctgagttatataagaaagtaggcaggtcaatccatgaagagcaagccgatgcttctgtttcagttccttccttgacttcccatagtgatgggctgtagtctttgaagcataaacagaccctttcctccctaagttggttttgttcatggcattttgtcacagtaaaagaaatcatgcctaagacattgctcttgcagagaatacaggtctggtctccagcacccacaaaaaagcagttcacaactgcttatgactcaagttccaggggatccaacaccctcttctggcctccgtgggcacctgaatgcatggggtgcacataaactcacacaggtacacacacatatataaataacaaataaatgataaatattaaataaataatacatcatgccaacaagatgtcatgatgataacacactcctacacacctaaagaaaagtgcttgcctctccatcctgtacactgttgtattagaccctaccattatacattttatatggacacaaagtactccttaatggacagaaggtttttctctaaatccccacaaatgtttctctaggaggcatgtgctttttgacatggactgtatctgttagatgttcaaaatacccatctctctggggagattcattacagttcaaattatacatgtctgttaaagcaaagatcagttctacctttcacatatttgttattgctgctttctgaaacttccttccagccccaaagaggtcttaatccctgtcaaatgttattaagtcactagcttttatatagtcttgaaagggattgtttatttaacttcagtgagtccttgttactgccaaatattatttcatttcagcgcagatgtaaagggtccaatgactggaattacttcacagccctgacactgtggagagatggataccagtttaattatggacagctgagaataatctgggagtcacctgctctggatatttatcatcattatgaacttctcaccaggctgtggcccgaacactttcataacgtcccatttgtgttgggcagacattatgatctatacagaacctgccttgtctgtcacctttgaatttatggatagacaatttaatattgcttgattattttcttttcctcttcttggagtgagaaaatgtgtttcagtcattcctgttccttttcctttcctctcaccccccaacccccgtctcaacggcctgctcccactgctgcctttgtccttccagctgcttttccaattatgcttcattggaaattattcattacttaaagaatgtgacctgggtaggctagacgcatgaaggaaccagcaatgcggagactgatatgcaatcagcactcaataaatgcagtggaaatgaaggaagagagcagagggaaccagaaggaggctttgaagctacagagtatttgccatagactgcttctatctgaccttgtagacattgtaaagaaaagcaaggtttctctttctacttctaaggtcctctgcccagtgctctgtaactacacacacacacacacacacacacacacacacacacacacacacacacaacttcccagtggagttagacacagggttgaatgaactgagtagtcaggctccagccagcgggtaatacacctcatccatccagctgtttccccattctcctctctcctgaaatcctttcagcagcctccatcctatatggcgtacttagataccactgagagctaactgcagctgctagttaggatgaaagtatcacttgccatgcttagtgtttactggcgttcgtcgcttaaatctcactacagtcatgaagacagtgctatgcatttttctctttctgaagacctttctcaataaggggtaatccccagacccaacagataccattttggaaatgtctggagacattggctgtcacaactaggtagaaattatgggtataagaagcatcctataattcacaggaaaaaagttccacaacaagggattactgtctcaaaatatcagtgtcactggtgagaagcttggagatggatttctttctttctttctttctttctttctttctttcttcctttctttctctctttttttactctgaagcttgaaggggttaaataacttgctcaaagctacttgataataatgtcccaacttgtacctttgagccacatttcaggcaagttgttaaatgactgcagcaatagattgatcatgcctggcaccaaagaagccacagttcccagtgagaaccttcgcataggagcacacctcggtgtaagtggctcttgtcaatcgtttacaggttacctactctggcatccttttcatcgcgcatatagaaccaggcccatggagagcagcgtttgactctaaacgttgacgtctctgtgcacggagacccacacactagaacatgtaatttctctgatttttaaaatgttattagcagatatatgacaaatatatataaaggcagtttatgtgagtaaatagtcgcactgcctctaatactccatgaaatacaaaacagagttacagtatataatgaacaagttatacataatgaatccattgaatagttaaatgatagaaaaggactttgatatctcctccagaacttttctcctatgcagcctattcctgggctactgtaactttaggcagggaaagggatgttccaagaaccacaattattgagactggccttactttcactgctagccttgggtatggctgtcttttacatttgagagaagagccaccttctgccctcaatccagcagagccatctatgtccaagactcactgcttggaagacttttcctgtgttctgtactgaaacactcagtctcaaaacacagctaaccacccacataataaaccaaatgcaatgtgagttgccaagttaaatctctccgattttcctaagcgtcacaatacaaaaggcatcaggtattgagaaagcatatcagaggggagaaaggtaacagacagaaagcagtagtaagctgacagcctctggcttttgttttaaacccttttatcctgttttatcttcatagagcaatagatttcccaagtgtccagaaacaaagatctcagcctagccatcacagattttcattgttgcctctttctgcacactgtgaccctgagcacacactgttactggtacaggtgggcaggcactgcttacaatgttggcaagtgctgaagaagcggctgcgccattgtcatttctgagtataaataaaaatacccaaaaggttatacaagcacaatttaaattgagattaaacttttcccaccttcttatcataaactcagcctgacccaaacatgtgactacctatgtgctaattttagccaatgaaaaataaaatcaaaaatttcaattcctttgacttgccataacatttatctaatcattagccatcataggcagaagccatattttacaatacaattaaagggcatttcaaatattatatccatctccaaataaaactatcactatcaatatacacaaagataaaaagttgaagagtgcccagtgttggtccacctagtaaaataaccaaacacacatacacatacaagagaagactactatctatatgtgcttgtatgtatatgtgtgtgtatatacatgtatacatacacacacacatagagagagggggggtgcttgtgcatgtatagggaattatggaagacttgtggcatctagattggttcacagtggttatctctataaagagctctggtgcaagggatggggaaatagtctcttttcgccatggaaatggataacatcctttctcatttgaatcaatcatgcactgagaaaagaaggtgatagtaaaaattatacatacattagatcctctgtatccaaaagcctgctcactcagagctgtgctagtcagggctacatttatctctagacagagattctgttcttgtatgccagattatccaaccaatcctaagtcatctgcccaaagaaatgaggctaaatataaagtcatgctttgtaaactgccacagttacagcaaaatcccacaggctccagaggaaactctctaaccaaagaacctttccctgcaggggaactcatgactatttacagcttctgaaagaaaatggcttcccctggctttctaacccccaccatagccactccttgctctctcctgctccaggcaagacaaatgcacatctaaaatctatgcacatcctcagaacttggttgagatcaaatgtgtatgttctgcagtgaacaagctgtcccatgtgttaagcacactggggaaatcaggcagaaacctcatggtttttctacacatccattccatccatccatccattcatgcatccttctattcatgcatccatccattcatgcatgcatccatccatctatccatccagtccccatgggaatgtatgagccaattctaagcactgggaaggcagatgcctttggttaatatggaagaacatacctcaaagagaagtggttggagggagcagtagaatctgtaggtgagcctgactgatcccctgacaagagaaaagtttgctttctgtcttcatgtttgttgtctcaaacattaaatggcaaatatggtggagtcaccatgcacactgatgcggaggcaaatgttgttcttgcttagtgtgctcagaatcacaagacatcctaaaagaaagggcatctatgcacacttccaaagcactcatcctgcaataaaactgtgccatcttcaccataatgcttgacattcttctacagcggccttttccagaagaggacacatccagtcattccacgcaaagccttcttatgtgggcagattcttccacctgtggagatggccctgacctgtggagcttcctgagactataagacctcaccccatcacagtacccaccatcttaatgaatctcactatcccctctggagcatgttgggtttctgactcaagccaggcacatttatttgacactttgacttgatgagtgcctaggttcacacccatatatgactatttttttgaccattttgggaagcttagatctttgtctgctgtgttccatcagtctttcaatagttacagcccttgttatcttgctatcacatacactgtcgtgaaaaaggtgggggagggggcagacgaaaatacccatgccaaaaggatatacattcctcaatatatgtcgcatattgaccttaacttcagggcaaatgatctttagagtcctgaaagctggaagcttgattctttttccttaattaccacacataaggcagggaaaggaagcctttccaaagtgttctgtaagaaagaactctcttaagccatctcttaatcccaacccccttttcagtttttaattccttaaaaggaatccttcacacaaaggtcctctgaggactcttcatctgaagccaaacctggcttctgactttgcgagtaacgatgtgaaagcaagaaaccgctggtggaaactcacgtgtacagaccttcctttgctgcttcgacaggggttggcccatgtgccacaagcaaaggttcagtctcaagttttaaattggcacagacttgttatctttaattttgttaattattctaaggtcattccaaacagccatgtctggaatcacatcacttcagagaaggcctagaaggaaggtgttcccatcgctgaggctgccactggtgtgcagagctgtctgtgggcacctgtagcactgagtggtttcctcatggaccattagcgccagcctagaggaggcattccacgggcctgcatcaccttctactctacccgctttgcatccacagatcatggagtcagtgtcccatcacccatctctccacatcaaaagtaggacatcactaaaactttgatgccatgccaggtttttattgagccccagaactctagagttttcagattcgcaaactaacttttacagcctgtaaaactttctctctgcaaacttttggttgtgcttctagtacatttgaacccagtgagagtccatggactcctggaatcaagaggctacaaagcatgagctgctacatccaatccattaccgtaacactaggcagatttcacccaaacctctctgggcgcaggtgagaatcctgtcttcacagatcaccagggaaaagactatactgccaacctaggtagcccagtccatcaccagctcctttcaacactgacatgatctttgtactccataggaatgaatgtttcataccaggctgctatgagctttagaaccccaaatttgaatatttggtaccaaacgtcacaaagcagcttgattgttagcacattattcagccactattgaaaaatggcatttcaaaccaaatattgacacccacaccttgggctggatccaccttcatttcctaataagttcctgggtagcaatctccttaggatcccaggacatcctgcatctgatcattgataaatggagagtccattttcttggtccttaaaatcacagctatcattccctttccatattgtgtgccagcaggacagagcctgccatgagaggtaagcactgtgcctctggggagtactcctctccctccccccacctctgtctctcacacacatgcacacacacaaacacagacacagacatgctcacacgtgcataaacacacacacacatgcacacagcttttggtttctggtttgctgctttgttgtttggaaaggaaagctttaaagacatcctctccctgggtttctcattgtgcaatgcagagcagggacctctatagtctctacaaggtccaattacattgttggcacttgaagatccacagggccttctccagctcaaagcaaaatatgcacctccctttctttaaacgatttcccttggcaaaggggaaagtcaaagagactggactagtcatggaaaccctgacccaggaactaatgtgagcttcagacaagacacagccccagagaagcagtgcacacggtcattgtctgagatcgagggcctgaaattgacaccatatgtacccaaggagcgattgctccaaggggtggggagagaaaagccatatgtcagaacattgtggcaacacctaattcatcctgaggttataaataaatatgatgctccttttttttaaaaaagcaaaggttgaaaaatctttaactagattgcttctgtgaccatccttcaggcagaagtggactttattagggagataacaggaataaagagaaacacgtaacaacttttatggtatattttacatgattttttttttgcagtaaataaagtggttatagggctccaaggaaaagagcccagatgttagagagttgtgtgaaatttaggggaaacaagctgtaaaaaacacagccataaaataggctgtcagtgccacacatctggacaatacagctgtatgttcctagtgcctgtcgtcacccaaagaaaactcaataaccttatttcaccccaattagtccacataccaacaggatcaacattaagcagccagggatgggggcggggggggggggtgcagtgcagcatttatatggtggccctgtgtcaagcagttttatctttcacctgaatttggtcaccaagaaaaaagggactgccaacatagtcattttcactattataaaactcgattcaattctaacatcctaataagtcaaagactgacagtttggactgccagctactccaaacaacatcagactctctatagcacgaaagctacctgtcatgaagcagactgtgtccactaagtacagtcctgggagtctgacaccactgtacaaagtgttcaccaccttgctgaagacggagctggtaatgaaatgacccagccttgatggtcctggacacatttcccatctacgagtttgtctggtaacagcctgtctttccattaagacaaatatcacaaagcatcaagcatcctgtcatcctcttatcactgagagacctgatcaaagattatacagtgttgtctttcctaataactgtttctttctaggtgttcctggcagcaaagataatcatggagagtggagagaaactaaccttaccattgatagggaaactcttgaagtgtcaacttctccatattaaatccaaggaccagcagagacgagaaaatgaaaagaaggtaccatatggaacatgggttccccagagctcagaagctagtgggtgggacagttaaagatccccccccacacacacacacacttcctaagcctctatagtgtgtgttgtggcaagcctgaaagtctcctctactccttagggaagcagctgctcactcatgggtgtattggatgagttgttataatacatattatgtccccttgtttgtgaaaatggcaatgtccagaacatgtaatcaaggtggttttatggtagaatctttaatattgtaacaagaatggggcccatatcacaagtaaatatcaaaacaaggggaaaagaattgccaaattgggatatatttaaattgtctgtgatatagactaggagtgtttattagcctgtcaagcaccctgccctttcagagcaaagtgacagcttcagcaacaaccagtcactcctgctgccagatcctctctctgatctttttcttcccacatagggaaactttttatttactctgcctatagaaatcagtgtgcttttaaaaatttacatttgcttctgaaaaaaaaatactttaaacatgcagaatgatgcccaattcagagccatttgttatgatcactactaggaatgagaaaggctttcctccattttcaaattatgctgaaatatttttgtgacagcagatgcttctgtacgcagtgtgatgtgtgtccacatgcataagtgatagattagaaggtgagttctttgtgaccttgagtaggaaggacaaaaaaaaaaaaaaacaactaatggaaatagaaaaggtaaatatattcccattatgccttccttatctttgcaaaacccttagatctaggtatcctatttgactgagttatttatgacaatgacaatgacggcgacggtgatggtggtggtggtggtgatgatgatgatgatgatggtggcggtggtgatgatgatggtgatggcatcatcactttgtgcttgcaaaagctctatgctttcctagaaagaaccccatatagcttcttactgggctggcacattttgtacccaagaaaattctattcaaagaaatggttcatgttatggttttccacctgccagtgttctttccaccatgaatcataaatctgtacactaagaaacactcagagaagctaaaagttagcaaaagaaaatttagacaatttaaaagtatagccatatcctcttgtgtgtttaaatgccaatgtcatgggagaacttgaattgtgtaagtgaactgtgaggtttgtgaaacgcctacagatgaacagcacactaaagagtgtcacaggcctgtttgctgcccactagaagtcagtaattgtttactacaataatttcagattttagtaagcaatcttcaaataaaaaatggaatattctagacactcagaaatttttaaatatgtgaactgacaaaatatccttacattgttcttctgctcagcatttctctgaactgtgaactatattaatatggttaggagattctgaagctatagaaagaaccttgatttgcttgttaaaactttgggtgtctaacgagccatggcttgaagttaatttattgaagaaaaagcagaagacgcagtaagagaactctgagcaattaagaaccaatttaatttaatatcctcattaccagtgctttccagagcaccagcctcttgtgtctgagctgaaaccatctgagcaggtgctaaataaatggatgaaaactgattggaatggattactccccagaaagtcgtccttgtacatgagaggtgaaaggaacggtttgcagggtgaggggtgcacatctcggcagtgccacctgagaggttagtcggaacaaatgacgttactgctcgtcagccaaaagtctggcagacagcaaagtaagcaggggcagcgagtcgtctgcaatagctaatgcaggtgtattaccagtgggggaagagggtcttcttccttggacgaacctagaaaaggctctacgttggttgcacagggagcaaatcgtaagttttttcaaccttgccattaaatttacagagatactcactttcatgagctagttctagtatatcgcttgcatctgtccaaccccaagaatgttttatatcttctgtgtttaatttttggaaatgaactttgcaaagaatgaatgctttagcgaaaaattatagcagtaattatagaaactgttacggcagagatgggggcgcagagaagtgataggattgggcattttttgtcttttggtccccatggaacagatgtaaatgcgtcaccatatatttggttctatttccacgtcttttttttttctttaaaaaacaaacagtaaattatagtttaaagtgccagatagaataaagatactttagtcctggctaagttgaagaatgtgctgcagctgaacacaggctgttgcttttgatttctgctttgaaaggaaacttgctagataattaatatcgtgaaaactataagggaaaggcgctctgaaggaaccaaggtaaaactttagcatgtggacttgtaggatacaaatgacaacttctaattgtaaatatgcttgacctgtttgaaaacactcatctgtttagaaatacctcggtaatgacttccagatatataaatatagatataggtagaaacagattagaaatgtgttctggtgtataaacatttctaacacctcagaacttctgaatgatgatcctgcataataatagcaaattaggctgctcacaatgtcataaaatttgaatggggatgtttgttgagaaataaaaacatctctaacatttcagaagtcctgaatattattatcctatattataatagcaaattaggctgtttgctatgtcataaaatttgaatgggaatgtctgctcagaaacgcatctcccctccaccgttaactcaaggatcactctgcagctttagtcctgcattaacatctgcagttaattcatcagcctggcaaacatccacaataacaaatatccttggacacagtgtcctgggtgcagggattcccatcacattcattctggttttaaaatacgtctcttggtttttattctggaacattttgatttggctattgtgtgattttttcttttcagtcactcttgcttcttataaacttttgtattatgtattaattataagtacttgcttgtgaattatctcagtgtgattaagaaactaaaagaaaagtggtgtttaaaagagttgggaaatggctatggctacattacaaaaaatcattgacctttaatattactaaccgatgtaaatggagtcttcctataattcagaactgaaatcagaatatttgaaaaggctttccccaaaatatccaaatatgttttaattgtgcctttcatgaattaaatctgctcacattttctcagactttcatagcaaacacttttatatgaagggctggttctttttgtctgtagattgtgtaccaagtatacacatacacaagaatggagaaaaggcagacataaagaactatgggcagacaatatctagcaccttcttcattaaaaaaaaaaaagacaaataaaacagcctaattttgctaacatggaataatgaggccccatacaagcggcagccttctcccaaggagaaatgaagagagagtaagaagaaccactcccacagacatccccgagcttcttccagtcaaaccccgagaagctggaaatcggccagagaaatgccattttgtgcgtgtgttttattttaaaggaaaggccatagggacagaccaggaaattactggctggttagttttgattcagttgtggttaaattcttcagaaactattttaagaagtcaaacagaggaagggcagggaccctgtgtggagggctcctgggtggttctaggaaaggaataacttgcctcactaactggctggaattctttgaggcaggattatcaaaatgaagatccaactgacaaatggaagatctaaggaaccccaaaccccagcaattctgcagaaataaatgatgccccagctggcctctctgaaaaacaggacactgctgtgctggctgttttgattgttattaatgaaaacttttcatgcactactagaaatttttgattaaagagggacaatagactagcatttttagatagcaattaataatagctactattagtgactgtttgactctatatctttagacatgttatattatttagaagttaaacaatttaatatcattagtacaatgaaccactcctaatttgcagatggtgggactgtgggaggtgggaacttaagccttcttgaagaaggctctcaacagtcaagagtccaaccccaaccatcaggttgcatgtgtgctgttaaccactgtgaacatctcacctgtctgtctcagtaattctgagatggcctctggctctcatgcagtaaaacgctgtctggtcctgtttccctgggactcagagtcttgctggataatctgtccacagacatctctggtcccatttccccaggactcagagtcttgctgcataatctgtccacagacatctgccctgactgatcttttctcatacaactttgtgaggttcagtgtggggacagttgtcttgaaaaggaagaaaactcagcaaagataaacagcactgggttaactaatcactgatacaaagaacaaccatgtcttaatttctagttctttcttcccaagaaatcaccgagtctcttaaagaatgagactttctgagcttattttgtataccctaatgccttctccctgccccttccggtggttaatgaggatatcattagcttgcatgatgccaaagtttctctgagctatgtatgatcctgcaggaagcacatatcagacctgtccccttctcaggccaccacacacacagacatccctatgttttgatccacggaactaggaacagtgcaaattacctcccatgcctaatactactgtgtggtcttataaagagtgtatcatttgatcagttgaaacaagtacatccctaagcatgaatgtgtatattcatgtaaacttatgtgtatgtgtgctgctggtgcctatagaggccagaagaggaaactgctcccctagagctggaattatatacaagctcttgggatcttcccaatgtgagtgatagaaaccaaactcaggtcctctgaaagaacaactagtgctcttcaccaccgtgccatccctccagcctctctaaacatatttttcttcactctaacacagcagttctcaacctgtgggtctctacccccttgggggtcaaatgaccctttcacatgggtcgtctaggaccatcagaaaacataggtatttacattacaattcatttcagtagcaaaattacagttatgaagtagcaatgaaaataattttatggttggaggtcaccataacatgagcaattgtgataaagggtcacagtgataggaggactgagaaccagtgttctaacagctctctggagaagcaagtttttaattcaacttcatgcattttcagatctctggaggtactggaaatgacctggggcagtaagcagcaagagggagagtggagaggaataaaaaagaaaatatagaaataatgtataaagcataacagataacaataaactaccatcatcctgttattatcaataacagtagtattcagaatgcttccttttctacttcttgatatatatcataaatactataatatattatatataacaatcatactatatgatatatggaatatacatcatatatattcattcctttatagaattataatcatggtaaaatatcttaatagtttttagctaaaatgtaccataatttggctattatgacaacacccatatctattgttattacttgttctgtgagtttctactgcttatgctaattttcttatttattattctgttgatggacatgtatgtgctttctacatttggggtagtaaataatatactatgcagtacacagtggtctatattttgaataatgtttttattgtagattttaaagctggattaattggttccccaaatattcccataatcttgtgttttcaaattgaactgttacaattagacatagttctccatgtaaaaaaaaaaatcaccctgatcaacttaacttagagatcactgtgtgtgtcatgcgccatcttggatatttgacagtatgatggctaattaacagtgacgggatttcataaaagtaaaacatatctatttcatacatgtatattctgagtttagaccacttcacacactcgagggcatgtgcgtgtatgcatgccctctctcattacttcctttgtactgctcaatcctttttcaagaggataaatatggttaatattgttttacctcatacacagtctctgaggctctcaccatctctggaaccaaacaagtgacttgcttactagaaggagtgagatgatcaaagagctctagcacaggactcagaaaagacctagtttcttgtaaaacacataatggagtaagttagttacaacttccacaagtctgctttctcctccatctccttaattttactgcaaagttcttacagcaggccacacatacacatcagtgatacatggtatatagagaattggctataaaataaatgaaatatagctattcacttccatgtacttggcttttaccactgaaccccacccccactactgagaaaggaagaagggatgtcaattaggtttgagtgttaacatcaaaatgtcatttagaaataaaatattatctgaaaatttttgaattaccaaataactaagttgctttgttacagaacagaaatttcccccatctttagaaagatgatgtaactgaagattctatatagattcccttaacagtcaagtgagtatgtggagtgctgtaactatcttcaggtattgctttgcatgagaccgccacatctgctaagaagcttaaatggttcagaagtccctgggcctacccaaagccttcctacagtaggaagcatccagatgtcttgtattcatattctgttttagagagagtgcattccatgataaacatgaacctccacccacgtgctagggatatatgttccccaacacagctggggagaaactttttccctgtctgcattttgtcttgaattgacaagagactccctcaaatattttaagctataagaagaaggccatggaaaaggaacatgaagtcatagtgtctcaaagcaagaaagagtatatgagcaaagcttagtttgtgatttagggttcattcatgctgaatgtttgtctagtctgccttgttcagctttcacctgtaacggtgagtttagctaatccactttggctcctggcaagttgcacctgtgcactcccgcacccacccaggagctatctagatgtgtaaatggaacacacacacacacacacacacacacacacacacacacacacacaccagttaatttcaaaatgccttggctacctcaaaggctgggcactctttaaccttcccctgctgtcacaggccagtggccacccacctggattctcacatggctggttggctttctctcctgcagcttctataccacattcttctcccctgagaaatagtgattctctgtctcctttttcccagtttctagcccatgcaaatctaaaggtcccaccctatctcccttcaccccaactattggccgctggcatctttattgatcaatcaaaaaccagttaaggacaagaaccttcagcatttggacatggagcttccagattaaaccaaagcatttgaaccaatccctaacatttacccctaaatgctgcaataacctgtatgttagataggggtacataaaacaagagaaaaatgaaaggtaaggtttgagcttcctgtgactagagcttagtagaaacagaagaacctatttcaaaccaaggaacaactgtaggatcctagctaccagtctttgttcagaatgagggagcttgaggatgataaggccctggatcagcctcagtatggatagtggggggaagggacagtctaaacatgggagagtagataagtcaactttgaggtcagctatgagaagatagaagagatcaaggaacctgttcagaaatccaccaacaaacatctctgccagacctggagcccattagaagcaggtgcttgtgtctgcacctgctcactgccatacagtttcttggcactggagaatccttgctgtgcccggaggttctttcataaccatctttcttgaagttctaacaaccattattgttaaatgcaccatgaaagatggtaaactgtctagaaagaaggccaaagatagtcatataaaaatgaggcagagaagtggaagcaaaagcaactatcttcactcatctttctaggtgctgaaattttggaaacttgtgaacttcttcatctttcaacttttcagtgatgataactctttctccagtacagtggtgttaaaaggatgaccggggtgaaacaaaaacatgtttgtgaaagtgaaggggggggtgatggtgatcattcacttatactaaaagaaacggatctaaggattttgttcccagcttcctggtgtggccttgttaagaggagaaaaagacagtcgtgagtaggaagcacgggtagaacatccaggaatgactgctgggtccctgggaagactgagcagagggagtgcagacactgataaaaggagagaggcagaaggacagaaggagaggacactgggaaagaagcagaagctgaggccaactggagcctcagaacagtaagaggagcttagagccgcaagtcagagcagcacagcctcttccacagctcggtgtcctcagacaaactgtgtgtcttaatagaaattacccgtcttgctttgtgagatcagattaaaagcatggtgtctgaaatcacatttcatactgcattactagatactggcaccagaatttgtcactgattttgaacttggggttatgaccagcctatttctaagacccctcaccccaagaaaaaaaaatcataggaaacaatgctcaggatctcctgaactggtaaactccatggaggaaaatcattcaagaattttcccccactgtgctctgcaaatgcatgtagaatgctgagctatttgaatgagtgcataagttgataaaaaattatcccttagaattacttaacctaaaatcactttcttatctcagttcaaagaaattaccccaagaccttgttctaaatttcagccataaaggcttctgaaaggcctttgatggaaaagttgtgactttactgtggcaagggtaatgcctacgaaggacattcacaggggtttcacgttgatatatgggccatcacccaaagctgagttttcagaggccctgatgagccccaataaagcccacaggctcactggaatcagggccatggctgtgctccaaggactctttgcagagaacatgggtgacacaactctctgacctggcattcctgttcaataacttggttattaaattgttgctcgctcccaccaagctttataaagtgaagctaattctgtacccattgtccctgcaaggacttaacaaggtgcaatgtttgctataaaacatgatctctgtaaatggaaatatcctaaatattgatgacagccatgattaaaatagctcattgctaacttatggctgagaatattattttcggtattacagggcagacttattggcttaaagttttctccttgtagaaaaatgaagttatagagagaacttcaaatataaaccagaaaggtgtgtttaatgttgtacagccttggtgcctgatgcagcagcccagccacaggtacctgctcagtcttccagactctcccattggtctgtcactgccctggacacttgaacaggctctaacatccttggcttctctgggtctttttttcctttgtcattgattcttttcttatttctctcattgtgaacagaggttttcataatgacttcttgattatctaatggtcatttcctccatcccacatcagccatttactcctatggttttctaccctggcccatcaccactgaagtgttaaggtctcccattctctaaacttggatgtcccctatcctcccctcttaaaatgacctaataggaacttcccccatccccaaagtgtcttcaactccattgtaagtgctggtcaacagcagccaccagtctctatgtattgtcatttctgctgtttgtcttctactccatggtccacacctgtcgtcttgtgctttagaaagtcttatttcctctcttttctctatttccatcatgatcttgaactcagcaaccccaccctaccctcttcatgtttgtatctgagcaaacaaagacaactcaagacgttcagaggacccaacatgcttgttctgttttcatcacacaaaaggctaaatcctaccacattcccccagtacacttgctctttgactgtctgagatgaccctgacgttatctaactttattggaaattccacattttttacctgctgatcttgcctgctgacttcatcacacacacacacacacacacacacacacacacacacacacacacacacacattctcttgaaaactaggaacattctcacttctcttgaaaactaggaacattctctcaggaccacccagagctcttcctttcttccatctacacccaacaactgagcctctctctgtggctcatcctgaactagtgaatcttgtctggaatttttcagatgtccccctataccttcaacatctccctggattattctatcaaccagcaaacatggaaactcctgctgtctacacagaggtacattcttaactcatctttatgcccactgccatctgctcacctgacaaatgatgcacggtccaagttcccttcacaacgaaacttgacaaggtagctggcccacacaaatgctgtccttggtgtcatgtgtctccatgtctgccacctctacagcttgccatagctgtctttgcttagtgttagccacaactacaggtgcatctttttaaactttttagtccacttgctgtgtttccttacatcctacgttttttgaccttttattcacttctccctcttattgactggcttcttctcctataccaaatggatagatttgggactacccatgatccaaagcccaattctcacatttcttagaagctcttacccaattctcaagtcaatttatgtctttccatgaacttatctgagctctgttacttgcttttggaattggtaactgcagttaacatgtctgaacacagaatgtggcccttagaagcacaaggtatgggcctgtgtaccagaggctttctatggagatctctggccaggccaggtgggagggttcaagtgaaggagaaagggtactagctatgctgtgctgagccagtgaaaagctagctagccagtgaggggaacttctggtggcctttcgggagaacagttcgcttacctggcagtggtgttacagcttttatgacagaagctctcagacaaggggataattctcacacaccttcattccttctggataggatctttgtatacagttttggagtgggttggggtctgacagtatgtacttcctattggcttggtctgagaggttagggatgcctaacctctaaatgtggaagggcttgggggtttgccactatgtgactgatggccacaaatctcttggggaaagggagggggcaggctgcagaggactgcagttatgtgacaggggcctggtgcctggaacagacaaagctcctaccatcccttcagggtctccaaggcttatagacttagcccaaccttaccaggcttcttctcatggccctccaatataatgtgatcacttacagtagtcttcccatgttaactgaaaactgcttctcaccagtgttctctatctcagtgaggactagcaccaaaccacccaggggctcaagctccgatccatggtgctccctttgatatgcctccttcgtcactattgtggttagactctcacagtttcaacatccagaatggatctgaaatccatctacgtttctccactctgccaacaccttcatgtgagtcactgttaggtcttctctggactatttctacatctccttattaaaatttcagttttttataaactcccctaccctaaaactctcaagtcttcctgctgatttttcaatgaggtaagaatttattggccccatctctaaagtcctgggttacatgtccattcctagttgtctacctttgccttgggccactctgcccttgtcttggtgccctatgtcttccggctctctgaacacacagtttctttatgcccacatgcctttacatggcaccttttccctgtttcttacggtcattctgactaatttttcagggttttgctcaaaggccccctccttagagaaggcatttcatccacagacttataagcacagtctcttcagttatgtttctgtctctgcagtcattaaaattttagttctgtttttgtctgtctgtctacttatctttcttttcccttagattcaactctaagaggtagtgcctagccctgttgtaggcaccaattcatatctaatgcagggagaaatgctggaccctctcacatccctgtgccaggcctgtgtcacatccaaaactgttcatgacactcccagcctctgttgctctgtccctctactcacagaaaggtccactgagcaagcaaatgattatatggatgctcacattaaaaaaaaaaactcacagattttcacaacttctgtgcttgctgtcattttctcattaagcttagttcttcttcttcttcttcttcttcttcttcttcttcttcttcttcttcttcttcttcttcttcttcatcatcatcagggagagaataaggaagacatatgtctggtgggcttgactttgactctgtgctcttttccttttaactgcccttgtctgtctggcatgggactggtttcttgaattttcacttccatcccaagggcttatgctgtggctgctgccgtggctgctgtggcagaagtggctgctgtggcacaggtggctgctgtggcagaggtggctgctgcagctgcctttattgaggttactgcttctgtctcttctatcctgatgtcttaccacttgcatatgcttcagccacattgaatttctcttcattttctgcaacctctggtgtactttcccagtttttacccagtgctatcagcaggagccttcacagatatttttttcccgtggctgttaaggagcaagagtggcagcgttgccagccttggaaccctcacactagccagggaatcttttggcaccagtgatgccgtccgtgaaaaccaaagtttgcctgagtcagtccttcagagcccttagcagcaaaaaaaaaaaaaaaatcatatagagcacaaacttctctcccctctatcatgcaacctgttggctgagtaccaatgctccctatcttcgacttacccaggctataatatcttagaggttttcaaattagtttccatgaccttaggaaatggatgtcaaagcccaaaataattatacaatattttaattatttttatcttcaagtatttttacatatgaaaaaaataagatgcacatatttatctatattctgtagagtcatcatcttaggccctgtactccactatcatttcaatgagaataaacacttccaatttatcaacacagacgcagttttctcaacataatccattttctacagtgtgtatttctcattcttcatgatttcactgtttctcaccatattcaaggtcctacagtgtgtgtttctcattttgcacgttattcagtgtttctcgccaaattccaggtcctaccatgttagtttctcattttcctcgtttatcatttttctcgccataagccaggtcctacagtgtgcattgctcatttttcatgtttttcagtgtttcacgccatattccaggtgctacagtgtttgtgtctcattttccacgtttttcagttttcctaggaaatagtgtgcaaagtttgggggaagttgtgaaggggcagggtaaatattggatcttcccacagacatgtgaactaagcacgccctagagcaatttgtgaagaatacaagcaaatgtcaccctctatggatcccctcttcctagatatcagccactcactagtcagggctatatgcttttaagcagaattgtaataatgagaattttttttttagtgttaagatctcagaagaccttttaacctttaaaaatggccaacatgaaaaacataggtagattttagaaagcctattcattgtcttccggtttgttttgttttgcttgattgttttcacacaaagacatgtgcactccaaaattgggctaagagaccaacccaagctcctgacaccacaaggtattctgactcttcctccgattctgccctaccccacatcagcacaagcacatagctcaaattattgagagactcctttagatgaccctcttctagaaggctactcttttaaacaacctcctggtacctccccactacactcctgcctgcccctcagtgcccctgtcttactagtatttctattgctgcaacaaaataccatgaccaaaaatgaagttaaagaggaaagggttgattcagctcaaatagttccacagcactgctcatcattagaggacatcaggacaggaactcaaatagggcaggattctggaggcaagatgatgcaaataataatggaaatgcagtaaaatcaagagttgatttgatgacgtgaattagaggatgaagttgcctaagtttggggaaacctttgcttactcacaagatgacttggagggtaagaatgtgctttctcgtttcagatggtagaagaaagaacaaaatcagaaaaagacaaaggaaaagggaagtctccaaaggagaagaaagttgccagtgccaagcctgggaagggaaagagcaaggaccagcctgaggccactgtaacagtgaggaagaccacacagttaaaacggaggggagaagatgacgaggccaaatcctatatcggtcagtgtgtagctccacatggtgtcttccacctcttgctttatagaccagaatagggctttaagagtcacctctataattacacactatcattcttagcctttctattttaaagccacatatgacctatgctctgtggcactcagattgaaaaaaatatttctgtttgcaatccatgtatggttttagctttttttttctttctaattactgtcttgatgagaatgtaatggaaagtcaggtgtaattataggcaaactgaaagtgatctagcaagatggctcctgaggaaagttgctcactctcaggcctcaccatcacccccaggcttcttatggtggaagaagagaaccagctgccacaagttgtcccctgacctcctcaggcgcattatggcacacacaggcatgactgtacagcacacacacgtgcaagcacatgccacacacacacacacacacacacacacacacacacacacatacacacacacacagataagttagtggaataaaagttgatacatgtgagaaatctaattatttgagaggatatgcagaacacagcttcttttttatctatacagcatattttatttttatttatttacattcccaatgcagttccccttccctggcccccacaaagttcctcccccccttccccttctcctctgagagagtgggccctctcctagctatacccctatcctgacacatcaagtctctgcaatattaggctcatcctctcccactgcagtcagacaaggcagccctatgtattggggcaggggagggggggcctcggtccaggccatccatgtaagaacgcatcttcttgactcaaacttttcacacaatctttctgtcttcaacagatcaaatagaacttcgttctgtcataattggctgacccaaaactgagtcattttcaggagttactcatgatttgagtgattcacagctggttttctctgagtccagacagaactacctgttactatctttattttatttgtttgttatttgtaatcaatagacttgattcttgatttctttcaacacttttgatctttactgtgtttaaattaagtaagagaaactggcttttttatttttttgcatcttttatcagttgatccctctcatgtatctctacttaaagataataaaccccaaaacaatgattctgtgctctccatagtcaataccaatgctgaccattttcaaggttggggagaattaattacatgaacttaaaatgtgagcatctgttgtatggcatgtacattggctttactgagctgcactgtgctgcactgtacagtgtaaagttcttgtgtatcatgcatggtcagcatgaaagcaggacgatttctgtcacacccagaacatcgtagtctaagagagtctcatgttttaatattcataaggaacattaccaggaaaatgagaatagagaactactttatactatgtatgtcttcagaaggaatacagtatagctgcctcaccattgatgcatggtgttctcaccaccctgacatgaattcgttcagtgctatgctacagagcacatccacagtatttccttatcctgtaaacacctttacttataaagtaccagaaatctggagctacttgtaactcgggagttaagccagatgttgctcaactgagattagaatcaaaggaaactagttacaggttaaactctgacaaaagctcaggcaccatgttccatggccgcagaccccatgtgtgttggccctcctaatatgtctatgtctcatttgcaaacatgatttaatattttataaaatggccacagtctctttactggaaaagcaataatgaaaaacagtcaacaggcctgtgtcccagccaactgcctgggtcttggcaagccagagagattacgaacataagcataattgagtttcaccactggtttgcctggggacaacctgttctacctaacaatgagagctgaccttctttctggtatttccaacagatgatgagccagacgatggtgcccaatattacattattgttgtgggcttcaacaatcctcagctattggccattatgactgagcttggcattcctataaccagtgtgattaaaatatcttcagagaactatgaacctctacagacacacctggcagcagtcaggcagcaacaggaagctgtccttcagccagaaggtacacacttggcctcggaactcacagagtccatcagtattgcccctacccctcaatacaaaggcaatctgctgtctgaaacatggttataaagcatacactatattaaatcctttcaagactgatttgctatatattctgcttatatcagccaagagccataaatttggcaaattaaaatcatactcggtgctcgtatccctgtgtagtcacagaaaacataactccaggtcagaagacttagttactcaactgttctcagtcttttagctgaaagcaagggtggtaacacaactttatttttcaggaacttttgacctgcaatgtttagccaaagcctgggctagataaatatttgttaatactcttttctttcaaatgacatagtcactgaacagctctgacaagatcatacagttgtgtgtgtgtgtttgtgtgtgtgtgtgtgtgtgtgtgtgtgtgtgtgtgtgtgtgtgtgtgtgtgtgtatgtgtattcatggagaacagaagatggtgttggaccatttggagctggagttgcaagtggctgtacataacctgacatgggtgccaggaaccaaactcaggtcttctggaagaatagcaagtactctcaactgctgagttacctgttcagtttggttttacatgttagttattctacatatattactaactcattgtaataaaagtcagagaaaacattgtatcttccagacttaaattgggaaattaaagagatgaagccacagccatattattgtccagtcattttgagtattggggtctttatctcaaggaatgtgctaatttacttctatgggacaaaaaccagaaagctactgtgaccttcaggtaacagcactgagaatcaatgccaatctgtgattccaggggccaagttactcttactatatgtgttgatattgatgttatcataaatattttcaccatgccttttaacttacagtcaaatatcaatttccttctatttttccccaaagttagaaatcactacctttgataatattaataattaccatttattgggtgcataatttgggatctaagctcaatgctaagagttttaaatatattgatttttatagttttcccaacattccaaggaagtatattttatcgaaaaaaatactttcatatatcttgtggttttccactcccctagttccttaatcatctttcctacctctacagctactcaaattattggttttttactctcttaaaaggaaaacaaaaaaacccacaaaatacacagagaaactctacaaaaacagaaatcaaaatcttgcttatatagtaagagacaaataaaacaaacaaacaaaatgccccccagaatgtaaaatgaaacaaagtctgaaaaatattattgaaatagctttgtgctgaccaactactcctgagtatggggtctgttatgcaatgttgttaatatacccagtaagactcacttggagaaaacggattttccttttaccagttggtatcaactacagataacttcttggttaggggtggggccctgtgtctactttcctatttcaatgcaggaaccttacctggcttaaatctatgcaggtactgtgcatgctgccgcagtctctgtgatttcatagtgcatcagtctcctgtgggagaggcactgttttcttggagttaccaattacctctgtgtagatcctggaaccttgagaaaagatcattgatgaaaatatctcattcagtaccaagtaatctaaagtgtcttactctcttcacattgtctagttgtgagtctctgcgtcagtttccacctactgtatggcattaatccatgtgtatagcagaatgtcattaggaatacttttactgctgtgttcccttagcagaataatagtgttaggttttcccctaggcccatggcacatatgtagccttgggttcttgaccagcttagcaatgtcgtgtataggttccatttcatggaaatctcaaagcagtttactttgcattcccctagtgcataagaatgttgaacatttctttcagtgtttctcagccatttgtgttttccttttaagaactttctgcttagttctgtatagaccatttttaaatgaagttatttggttttttattcagagtttgtttttttgttattgtgtttgttttatcattctttatgtgttttagataccaaccctctatcaaatatataattagcaaagaattcgtttcattctgtaggttgtcattttttaaatgatggatcctttccacacagaagtttttcagtttcaggaagccacgtattaactgttggtaatacttgtgctattgatgtctttttcataaaggcctttcctgtgctaatgagtttaagactaatcccactttctcttctgtaagacttggtatgtctgcccttatattgatgtccttgatccatttggagccggggtttctggttttctggttttgttttgttttgttttgttttgttttgtttttgtagtattatgagtgtggatcaacttgcattcttctacatatagccattcagtttgactagtatcacttgttgaagatgctctctctttctccactgtgtatttctggcttctctatcaaaaatcagatttccataggcatgaaaacttatgcctatggctttgattagattccattaatcagcatgtctacttttatggcaatactttgtgttttggttattgcaactctctaatacaactaaaaatctgaatggtaatgcttctggcattattgttgttgttatgttgttatgctattctgttgttgttgttgttatgttgttattcaggataattttagctaccctggaaatttttggttccatatgaagttgagaattgctttctcaatatcttgaaagaattgtgttagaattttgatggggattgagttgaatctgcagattgttttgatggggtggccattttaagttcattaatcctaccaatccttaagcataaaagatcttattaatcttctgatatccttttccatttctttcttcttaaagacttattatacaagtctttccctgagttggttagagttacccaaagatgatatttttgctattttagaggttattatttcctgatttctttttcagaccatttgttatttgaacataggaaggctattgattttttttacattaattttgtatcttgatacttatctgaagatttttatcagcattagaactttccttattggattgataggaatgcttatgtataaaattatgtcatctgcaaataaagatacttcgacttctttctttcctgtttttatacccttgatctccttcagttgtcttgttactctatccaggatttcaagtactgcataggatgtgtatgaaaagaatggacatccttgtcttatttgtgatttagtgaaaatgttttgagtttctctccactcacattggcattggcaatgagcttattgtaaattgcttttattatgttaagatatgtcatttgtatgtctttaggttgtttatcatgaaatggtgttggattttgacaaaggtcttttctatatctagttagatgatcatgtggggttttttcgtttagtctgtttatgtcatggactacatttattaattcatgcatgttaaaccatacctatatctctaagtcgaagtcatggttcataatattttatttttcttttattggatattttctttatttacatttgaaatgttatcccctttccaggtctcacctctggaaccccttatcccaccctccctccccctgcctatatgagggtactccctcaaccacccacccattcctgccttcccaccctggcattcccctacactggggcattgaacaccctcaagctgaagggctgctcctcccacttatgtccagtaaggctcttctcttccacatatgcagctgggtctctccatgtataatttttggttgttggtccagttcccagaagccccgggggtgtttgaccagttgacactgttgctctaatccatgggtctgcaaaccccctcagatccttcagtcccttctccaactcctccatcagggaccccacattcagtccaatggttggctacgctcatcacctttgtatttgtcaggctctggcagagtctctcatgagatagttatatcaggctcctgccagcaagcacttcttagcatacacagtagagtctgggtttggtgactatatatgggatggatccccaggtgtggtagtttctggatggcctttccttcagtctctgcaccacactttatttccatattttctcctgtgagtattttgttccccttctaagaagcactgaagcatccacattttgatcttccttctttttgagtgtcatatggtctgtgaattgtatcttaggtattccaaacttttgacttaatatcagtgagtgtatatcctgtgtgtccttttgtgactgggttatgtcactcaagatgatattttcaagttccattcgtttgcctgtgatttcatgaattaattgttttaatggctgagtagtgctccattgtgtaaatgtatcacattttctgtatccattcctctgttgaaggacatctgggttctttccagctccaggctattataaataaggctgagatgaacatagtggagcatgtgtccttattacatgtcagagcatcttctgggtatatactggggagtggtattagtgggtcctcaggtagtactatgtccaattttctgaggaacagctagactgatttccaaagtggttgtatcagcttataatcccaccagcaatggagaagtgtttctctttctccacgacctcgccagcatctactgtcacctgagtttttgatcttagccattctgactggtgtgaggtggaatctcagggttgttttgatttgcatttccctgatgactaaagatgttgaacatttctttaggtgcttcatggccactcaatcctcagttgagaattctctatttagctctgtccccatttttcaatagggttatttggttctctggagtctaacttcttgagttctttgtatatattggatattagccctctatcggatatagggttggtaaagatcttttgccaatctgttggctgccatgttgtcctattgacagtgtcctttgcctttcagaagctttgcaattttatgaggtagcattgaagggattcttcatcttagcacataagtgctaagcattaagacattggtattctattcaggaaaatttcccctgtgcccatgtatttgaaactttttcccactttctcttttattggactcagtgtatctgaaggccatttatccatgtggacttaagataggagatagaaatggatcaatttacattcttctacatgttgaccaacagctgaaccagctccatttgtggaaaatgctgtcttttttccactggacggttttaccacctttgtcaaagatcaagtgaccataggtgtgtggattcatttctgtgtcttcaattctattccattaatctaccaccctgtcactataccaataccatgcagttttttatcatgattgttctatactacaacttgaggtcagggatggtgattccaccagaagttcttttactgttgagaattgtttttgttatcctggcttttttgttattccaaatgaatttcagaattgttctttctaactctatgaagaattgagttggaaatttgatggagattgcattgaatctttagattgcttttggcaagagggccatttttactatattaatcctgacaatgaatgagcatgggagatctttctatcttctgagatcttcttcaatttctttcttcagacttgaagttcttgacatatagatctttcacttgtttgggaagagtcaaaacaagatattttatattgtttatgactattgtgaaggatgtcatttccataatttctttctcagcctggttatcctttgagtataggaaggctactgatttgtttgacttaattttatatctagccactttgcagaagttgtttatcagcattaggagttctctggtagaatttttggggtcacttaagcatactaccaaaccatctgcaaatagtgatattttgacatcttcctttctaatttgtatccccttaatctccttttgttgtctaattgctctggctaggactttgagtactatattgaataggtagggagtgagtgggcagccttgtctagtccctgattttagtgggattgcttcaagtttctctctatttagcttgatgttggctactggtttgctgtatattgcttttactatgtttaggtatgggcattgaattcctgatctttccaaggctttcattgtgaaggggtgttgaattttgtcaaatggtttctcaacatttaataagatgatcctatggttttcttctttgagtttgtttatgtagtagggttacgctgatggatttctgtatattgaaccatcccaggatccctgggatgaagcctacttgatcatgatggaagatatttttgatgtgttcttggattcagtttgtgagaattttatgaatattttttgcatcgatattcataagggaaattggtcttcctttgttgggcctttgagtagtttaggtatcagagtaattgtggcttcatagaacaaattgggtagagtacattctgtttctattttgtgaaatagtttgaggagtattggtattaggttttctttgaaggtctgatagaactctgcactaaacctgtctggtcctgggctttttttggtgggagactattaatgactgtttctatttcttcaggggttatgggactgtttagatcattattctgatcctgtttttgtttttttatttttattctttgtatagtccttttgtttctacttggttgatttcagccctgagttggattatttcctccagtctattcttcttgggtggatttgcttctttttattctagagctttcaggtttactgttaagctactagtatatgctctctgtattttttttttttttttggatgcacttagagctatgagtttgcctcttagcactgctttcattgtgtcccataagtttaggtatgttgtgccttcattttcattaaattctaaagagtctttcatttctttctttatttcttcctcaaccaaattatcattgagtaggatgttgttcagcttccacgtgtatgtgggctttccgttgtttttgttattgaagaacagccttcgtccatggtgatctgatagaataaaagggattatttcagtatattttgtatctgttaaggcttgttttgtgactgattatatggtcaattttggagaaggaaccatgaggttctgagaagaaggtatattcttttgtgtcaggatgaaatgttttatatctatctgttaaatccatttggtccataacttctgttagttttactgtgtctctgtttagtttctgtttccgttatctgtccattgatgagagtggagtgttgaagtctcccactattattgtgtgtggttttagcaatgtgtgctttgagctttagtaaagtttcctttatgaatgtgggtgtccttgcattaggagcatagcagttcagaactgagacttcttcttggtagatttttcctttgttgagtatgaagtgtccttccttatcttttttggtaagttttggttgaaagtcaaatttaactgatattagaatgggtactccagcttatatcttaggatcattagtttggaaaattattttccagcaattactctaaagcaatgtctgaggtgtgtttcttgtatgcagcaaaatgctaggttctttttatttatccagtctgctagtgtatgtcattttattgggcaattgcatatattgatgttaagaaatattaagaaataatgtttgttaaaggtggaattatgtatgtgttgctttcttcttttgggttgtttttaagattactgctttttctagggtgtagttttcctccctatgatggagttttccatttatcatcctttgtagggatattatataaattaggttgtgtcatggaattctccatctatggtaattgagagttttctgggtatagtagcctgggaatgctatttgtgtcctcctagggtctataagacatctgcccaggatcttccttccttccttccttccttccttccttccttccttccttccttccttccttccttcctnnnnnnnnnnnnnnnnnnnnnnnnnnnnnnnnnnnnnnnnnnnnnnnnnnnnnnnnnnnnnnnnnnnnnnnnnntttctttctttctttctttcttttctttctcttcttatttaaaaaaattttattagatattttcttcatttacaatacaaatgctatcctgaaagtcccttatacccaccaccggcctactctcatacacacacactcctgcttcctggccctggcattcccctgtattggggcatataagctatgcaagaccaagggcctcttctcccagtgatggccgatgaggccatcttctgctacataggcagctagagacaagagttcagggggtactggttagttcatattgctgttcctcctataggattacagacccctgcagctcattgggcactttctccagctcctccattgggggtcctgtgttccatcaaatagatgaccgtgagcatccacttctgtatttgccaggcactggcatagcctcacaagagacagctatatcagagtcatgtcagcaaaatcttgctggcatatgcaatagtgtctgtgtttggtggtggtttattgtatggatccccggatggggcaatgtctgcatggtcctttcttccgtctcagctccaaactttgtccctgtagctccttacatgggtattttgttccccattctaaggagggatgaagtatccacactttggtgttccttcttcttgagttttatgtgttttgcagatccatccatttgcctaggaatttcagaaaatcattgtttttaatagctgagtagtactccattgtgtaaatgtaccacaattttgtatccattcctctgttgagagacatctgggttctttccaactccaggctattataaataaggctgctatgaatataatggagcatgtgttcttattaccagttggaacatcttctggatatacgccaaggagaggaattgctggatcctctggtagtactatgtccaattttctgaggaactgccaaactgatttccagagtggttgtagtacaagcttgcaatcccaccagcaatggaggagtgttcctctttctccacatcctcaccagcatctgctgtcacctgaattttttatcttaaccattctcactggtgtgaggtggaatctcagggttcttttgatctgcatttccctgatgattaaggatgtcgaacaatttttcatgtgcttcttagccattcattattcctcagttgagacttctttgtttagctctgtgccccattcttaaatggggttatttgattttctggagtccagcttcttgagttctttgtatatagtggatattattcccctatcagatttaggattggtaaaaatccttccccaaactgttgatggcctttttgtcttattgacagtgtcctttgctttacagaggctttgcaattttatgaggtcccatttgtctattctagatcttacagaacaagtcattggtgttctattcaggaatttttcacctgtgcccatatcttcgaggctttcccccactttctcctctataagttttagtgtgtctggttttatgtggagttccttgatccacatagacttgagcttaatacaaggagataagaatggatcaattcgcattcttctacatgataactgccagttaagccagcaccatttgttgaaaatgctgcccttttccactggatggttttagcttttttgtcaaagatcaagtgacgataggtttgtgggttcatttctgggtcttcaattctgttccattgatctacctgtctatcactgtaccagtaccatgcagtttttgtcacaattgctctgcagtacagtttgaggtcaggcatggtgattcccctagaggttcctttattgttgagaatagtttttgctatcctaggtcttttgttattccagatgaattttcaaatgaccctttctaactttgtgaagaattgagttggaattttgatggggattgcattgaatctgtagattgcttttggcaggatagccatttttgccatattaatcctgccaagccatgagcatggcagatctttccatattctgagatcttcttcaatttctttcttcagagacttgaagttcttatcatacagatctttcactcccttagttagagtcacaccaaggtattttatatttgtgactattgtgaatggtgttgtttccctaatttctttctcagcctgttatcctttgtatagagaaaggtcactgatttgtttaggttaattttatatccagctactgcactgaaggtgtttatcagatttaggagttctctggaggaatttttagggtcacttatatacactatcatatcatctgcaaatagtgatattttgacttcttcctttccaatttgtatccccttgatctccttttgttgtctaattgctctggctaggacttcaagtactgtattaaataggtagggagaaagtgggcagtcttgtctagtccctgattttagtgggattgcttcaattttctctccatttaatttgatattggctgctcacttgctgtatattgcttttattatgtttaggtatgagccttgaattcctgaattttccaagacttttattatgaaggggtgttggattttatcaaatgtttcttagcatctaatgagatgatcatgcgatttttgtctttgagtttgtttatatagtggattatgttgatggattactgtatattaaaccatccctgcattcctaggatgaagcttacttgatcatgatggatgattattttgatgtgttcttggattcggtttgtgaggattttattgagtatttttgaatctatgttcataagggaagttggtaagaagttctctttctttgttggatctttgtgtggtttaggtatcagagtagttgtggcttcatagaatgaatttggtagagtaccttctgcttctattttgtgaaatagtttgtgaagaactggaattagatcttctttgaaggtctgatagaactctgcactaaacccatctggtactgggcttttttggttgggacactattaatgactgcttctatttctttagggtatataggactatttagatcattaacctgatcttgatttaactttggtacctggtatctgtctagaaaattgcccatttcatccaggttttccagttttgttgagtatagccttttgtagtagatctgatgatgttttagatttcctcatattctgttgttatgtctcccttttcatttctgattttgttaattagaatactgtccctgtgccctctagttagtctggctaagggtttatctatcttgttgattttctcaaagaaccagctcctggtttgcttgatgctttgaaaagttctttttatttccacttggttgatttcagtcctgagtttaattatttcctgccctctactcctcttggatgaatttgtttccttttcttctagagctttcaggtgtgctgttaagctattagtgtatgctcagtatagtttctttttggcagcactcagagctatcagtttttctcttaggaccgcttccattgtgtcccataagtttgggtaagttgtggcttcattttcattaaactctaaaaagtctttaatctctttctttatttcttccttgaccaagctatcattgagtagaatgttcttcagcttccacaagaaagttggctttctactatttatgttgttactgaagatcagtcttagtccttggtgatctgataggatgcatgcgataatttcaatatttttgtatctgttgtagcctgttttgtgaccaattatttggtcagttttggagaaggtaccatgaggtgctgagaagaatgtatatccttttgctttaggataaaatgttctgtagacatctgttaaaaccattcgtttcataacttctgttgttttcaatgtgtctctgttaatttctgtttccaggatctgtccaatgatgaaagtgggaagttgaagtctccaactattattgtgtgaggtatagtgtatactttgagctttactaaagtgtccttaatgaatgtggctgcccttgcatttagagcatagatattaagaattgagagttcatcttggaagattttaactttgatgagtgtgaagtgcccctccttgtcttttttgatatctttgggttgaaagtcgattttattagatattagaatggctactccagcttatattttttgatatctttgtgttggaagtggattttattcaatattagaatagctactccaacttgttccttcagatcatttgcttagaaaattgttttccagtcttttactctgaggttgtgtctgtctttgtccctgtggtgggtttcctgtaagcagcaaaatgttgggtcctatttgtgtagccagtctgttagtctatatgtttttattgtggaattgagtccatcgatattaagagatattaaggaaaagttattattgcttcctgttatttttgttgtttgagttggagttctgttcttgtggctgtcttcttttaggtttgttgaaggattactttcttgctttttctagggcataatttccatcctttgttgaagttttccctttattatcctttaaagggctggatttgtggaaagatattgtgtgaatttggctttgtcatggaataccttggtttttccatctatggtaattgagagtttttctgggtatagtagccttggctggcatttgtgttctcttagtgtctgtataacatctgtccaggatcttctggctttcatattctctggtgagtagtctggtgtaattctaataggtctgcctgtatatgttacttgacctttttctcctactgcttttaatattctgtctttatttagtgcattttttgttctgattattatgtgtccgaaggaagttcttttctggtccagtctatttggagtcctgtaggcttttgtatgttcatgggcatctctttttttttaggttagagaagttttcttctataatttttttgaagatatttactggtcctttaagttgaaaatcttcattctcaagccgggcatggtggcacacacctttaatcccagcacccgggaagcagaggcagggagatttctgagtttgaggccagtctggtctacaaagtgagttccaggacagccagggctatacagagaaaccctgtctcgaaaaacaaataaacaaacaaagaataaaagaaaagaaagaaagagagagagaagagaggaaggaaggaaggaaggaaggaaggaaggaaggaaggaaggaaggaaggaaggagaaagagagagagaaagaaagaaagaaagaaagaaaagaaaagaaaagaaagaaagaaagaaagaaagaaagaaagaaagaaagaaagaaagaaagaaagaaaaagaaaagagagaaaggaaagaaagtcttcattctcatctatacctattaatcttagatttggtcttttcattgtgtcctggatttcctggatgttttgaactaggatctttttggattttgcattttctttgattgttgtgtccatgttttttatggaatcttctgcacctgagattctttctgccatctcttgtattctgttgctgatgctcccatctattgttcctgatttctttcctaggatttctatctccagagttgtctccctttggattttctttattgtttctacttccatttttagatcttggatggcttggttcaattccattatctgtttgattgtgttttcctataattctttaaaggatttttgtgtttcctctttaaggacttctacctgtttaacagtgttttcctgtaattctttaaggactgctacctatttatcaatgttctcctgtatttctttaagtgagttattaatgcctttcttaaaatcctctaccaccatcatgagatatgattttagatccgaatcttgcttttcctgggttatccaggactctgtagtggatgtactgggttctgatgatgcccagtggtcttggtttctgttaataagattcttacatttgcctttcaccatctggaaatctctggtgttcgatgttctacctgtctctggctgaggcttgttcctcttgtgattctgttagcttatgtcagcactcctgggagtccaaatctcacctgagtcccagtgctcagagcactctctgcaggcaagctctcctcttgtagggaaggtgcacagaagtctggagctcaaatccacctcctgagtcctggggtcagagcccttcctggaggctcactctcctctgacaaggaaggtacccaggggcctgcgtctcagctctgcctccctgctgaggatgaaggtccaagggtctctgtccaagaagctttgttgcttctgctgcccacatgctcaccagtgatcccaagctcctgggtatgctagggtgcctacagcatggagagtcctctggggaccttgtcaccctctgctgggttcaccccaaagatggcgtggggctgaccccgaccagaacaaatcccagcctctggtcaggtgaggttcctttgtcactgttcctactggcacaagaccctccgggattctttggaactgatgttgcgttccactcaccagtgatcccgaggtcctgggtgtgctagggggcctgcagcatggagcgtcctctgaataccttgggaacctctgccaggtttgcactgaatatcctgcccaggattctctatctttcatagtctctagtgagaagtctggtgtaatgctgataggtctttttttgtgtatgtgttttcctataattctttaccttttttttttgttactttacctttttcccttactgcttttaatattctttgttttgtgtttctttttttcttttttctattacatgatgggaggaatttctttcctggtccaatctatttggaattctgtaggcttcttctatgtttatgggaatctctttctgtgttagagaagttttcttctataattttgttgaagatatttactggccctttaagttgggaatctgtgctctcttctatacctattatccttgctcattgtgtcctggatttcctggatgttttgggttaggagattttagcatttttcgttttttttttactattgtgtcaatatcttctatggtatcttttatgcctgaaattctctcttctatcttttgtattctattggtgatgcttgcatcaatgactcctgatccctttcctaggttctctatctccaggtttgtctttcctttgtgatttcttttttgttttatttctatttttagatcctagatggttttgttcaattccttcacctgtttggttgttttcctgtaattctttaaggaatttttgtgtttcctctttaagggcttctacctgtttacctgtattctcctgtatttctttaagggagttatttatgtccttcttaaagtcctctaccatcatcatgagatgtgattttaaattagagtcttgtttttctgctgtgatgtggtatcccaggctcactgggagaactgggttctgatgatgccaaatagctttggtttctgttgcttatattcttacccttgcctctcaccatctggatatctctggtgttagctggtcttgctgactctgactgtggcttgtcccttcagaaatccttatcagtactcttgggagatgagttctctccaggaggaatttgggtatggagagctatggcacagggtaagctcctgggtgcagacagaaacctgaaggatcctgtcactggctgttccttggttcctgtgtcctgatgactttggactggtccctcttgggccaggaatttgagcagacatggtgttcttacctgtgctcacaggtatgtcagcactccttggagacctactctatcctggtggtgtttgggtttggaactctgtggcacatgatcagctttgttaacagactggttcataatctttttaaagtatttgttcttaggttcagtttggaaatattttattgagaattttttacacctatgttaataaaggatattggccgataatttttttcttttgacaagtatttatgtggttttggtatcagggaaatagtggccttatttaaaaacaataagaaatgttccttgtgtttttattttgtaaaataattttaaaggtgatggtattaaatcttttttgaagatattgtagaattctgtggtgaatctataggctctgggattttttggttggaggactataaactactgctgattctacttctttgaggggttatgggtgtggaggttgtatatatcatgaaatccatttgtttcttttagtttttccagtttggtaaagtgcagattttaaatagaaaatctgtattaactgaccagtgactatactgaggtttttggatcccagtgcagccccaagactttctcagggtgagcttttaagcacggaaaaccatatcttaggatgacatacttccgttaacaagaacagttagccagagcagaactacagaagccagaaaataaggttagttagagactttctcagaacatggactttgatgaattaagtctttactttagttttggcaggtagtgctgtctagttttatggccagaatggtatatccatcatggagtcagttgtactaaagaaaagttacccactgttactgtgtgagagtcaatgtgtgattttagctatagtcttttcttttataaacttggatccccttgtgtttgatgcataaatgtttagaattgcaatatcctcttggtatatttttttactttgataagtgtgtagtatctttctctacctcttgtgattagttgtggcctgaagtatattttgtcaaatattaaaatggcaacaccttcttgtttcttgagtctatttgcttagaatacattttcccatccttttatcccaatgtgatgtctattcttgctggcagtgtatttcttgaatgcacaagaagaatagattcaattttacaatttagtctgctagtctgtgtctttttattgagaaattaagaccattaataatgagagctaccaatgagcagcattttaaatttgttatcgtgctcctcccctttcatttactgttgtgagtattccttgtatcttcttatgtgtggttaacttcttcgtactgaagttgtttttctagtgccttctgtagcactgagttagtagacataagttgcttaaatttggtttcattgtaaaatgtttgatagctttgctgggtatagaagtctgggtgtatcagagttgatcattgcccctccaggcccttctggccttcagagtctctactgagaaatcctatgttattctaatgaatctaccacttacatgttacctggtgtttttcccttgtagctttctttgctttatatagttagtgttttgatcggtcatggggaatttcttttctggtcctgtcttttggtgtctcatatgctgcttagatccttatccttatccttatccttatccttatccttatccttagagtgaggaaatttcattcataattttgttaaaaacattttctgtaccttttaactaggtttttattcttcttctatccctattatccatagatttgttcttttcatagtatcccaggtttcttggatgttttgtagctgggttcctttagatctaacactttctttgactgaggatccatgtcttctaccttttcatctgagattccctctccctcttgtattctgctaatgaggcttacttatgtggttttggtgcaatgttctaaatttttcatttccagtcttatttcagttttttttcagtcactcttcctttgttaaatccactttcaagcctgtaattgttttcattatttcattcaactgtttgtttatattttcacagacttcattaagggatttatttatatcctctttaagatctttgaacatattcctaatagctattttcaagttcttgtcttgctgcatttcttaggacctccttaagtagggttgttggattcttgtggaagcacgttgtcttgtctattcatgtttgtgtttcttcactggggtaggcatctggaattatgatatttttggtgctgatatctcatcattgttggttgggtgctccattctttggttgctgttatcctctctagattcagatagctttaggaggtccacaatagaccataatgttgcagtccatgagtagtaaaaatgaatggggataccataaatgcaggcccaaagcagaattcaggaaaagatctgggagacctgggactgcattaagagacagagtccacataaaaagaaaatgggatgggaggagaggctcctacaaagaggctacattaggacaaagaacaaacctggagagacatagatgaaattgtaggaggaccccccaagtctacaccaagaggtggaatacccaggaaatggagaatgggatgctgaagacagacttctacagtactgagaatgaatctgaaaagatcataatggaggtcaaggagaataaatgtcacctactaagtcctagccctatgtggcctctctctctctctctctctctctctctctctctctctctctctctctctctctcaccaaaaagagaaaaggactttagaactagaggtaactattaagtcagaaatttgagattcaaacccagacccgtgactattatctcacaagatattcattaaataatgcattactgaagctggtgagaaaatgctgcataattaccagatataatctttatataagacagtgtactaatacacacacacacacacacacacacacacacattctgcatgataaaaacatactgtctcatatgtctaatcccagaacttgacaggccaagataggaggattgcccattggtttgaggtcattttcaggctccataataagtttcaggcaaacctacataggttacagtaaaactctgtctcaaaaaatatatataacaaactaatactaggccttttacaataggatgatatgtcataatattagacccaaatatttaaatgtagacataaaaaacataaatattttaggtaaactttcaagtctaactttatggaattctactatcagttgacagtcagcaggggcaactattcagaaaaaatgtccctgctgtaacatgaccaaaagctaactagagcataaattactcttaggcctgtgagaagtgtatctaggtcagttttttaatatacaaacttggtaaagcaaatacaaacttggtgaaggcatgatctgaggaaattcttgttctatgtaatatcaggacaatggtagcttagcattctttgctcccaaaagaccttatcacaatctttctgggcctaaactgtgagatggactctgatgaacttatatagtaacccattttgattttacagttgtgtcttcccacttcaaaaagttctcaaagttacgtttctgtatttgcactttgctaatactttacagacatcttatcatacatatgactcactacatcaagacaaagtggggagaaatacaatactttgattttatattaaaacattttgctattattagatatagaagctgaaaaattgaagagaaaaaattccatcaaggaacttgaggttttctggaagtacttggaaccaatcctgaataatgagaaacttgaaatacatctctttgatgttgctcgtctccagtacatggtcaaggcaacatattttccttctgattggtcagacaatgaacagatggtgagtctattggtcagcatgagtgagtggtccattcacagtcactcattccacagctgttcagtaaccactggtaacaatgacttttgttgggctctctcctctttcagacaatgatggtgacaaaggccactcttgtatcatagcctgattctgtagcttttagtctatagattaatgataataaaatatagcagatgcttattctttcattaaattacaattggctctggttcatgtattggtaatgatctaagtaataattaaaatgtatgatggtggcaaattttacgttttattgtattacatgttaatcccttccaaagtacacatttcagcatcaagagagctgaactgacagcaaagcctgtggggagactccaacctctgagggttcttctgaaaggatttgaacaaagctggatggagagagtatacttataaagagattacttattgctaaagagagagggtaggagaggataagggaggggagagggaggggaggggagaatatggaggggaaaagactgaggaaaaaaagaaaagaaaaaatgaaaggggaaagaagaaaaaggaataaagaaaatgggaaggtaacaaagggaagggggagggaagggaatggggaagaaaaggaannnnnnnnnnnnnnnnnnnnnnnnnnnnnnnnnnnnnnnnnnnnnnnnnnnnnnnnnnnnnnnnnnnnnnnnnnnnnnnnnnnnnnnnnnnnnnnnnnnnnnnnnnnnnnnnnnnnnnnnnnnnnnnnnnnnnnnnnnnnnnnnnnnnnnnnnnnnnnnnnnnnnnnnnnnnnnnnnnnnnnnnnnnnnnnnnnnnnnnnnnnnnnnnnnnnnnnnnnnnnnnnnnnnnnnnnnnnnnnnnnnnnnnnnnnnnnnnnnnnnnnnnnnnnnnnnnnnnnnnnnnnnnnnnnnnnnnnnnnnnnnnnnnnnnnnnnnnnnnnnnnnnnnnnnnnnnnnnnnnnnnnnnnnnnnnnnnnnnnnnnnnnnnnnnnnnnnnnnnnnnnnnnnnnnnnnnnnnnnnnnnnnnnnnnnnnnnnnnnnnnnnnnnnnnnnnnnnnnnnnnnnnnnnnnnnnnnnnnnnnnnnnnnnnnnnnnnnnnnnnnnnnnnnnnnnnnnnnnnnnnnnnnnnnnnnnnnnnnnnnnnnnnnnnnnnnnnnnnnnnnnnnnnnnnnnnnnnnnnnnnnnnnnnnnnnnnnnnnnnnnnnnnnnnnnggaagaaggggaagaaggggaagaaggggaagaaggggaagaaggggaagaaggggaagaaggggaagaaggggaagaaggggaagaaggggaagaaggggaagaaggggaagggaaaggaaaaggggaagaaggaaggagaaggaaggggaagggagagaaaaagaaaaagctaagaggacagaaggcactgattctgagccaaaggacaatcatgcagtgaagcactgatcctattaccttgtgatggatggcacttggcaaaagaagtgaaagtattaagaggagatggagactacgacagaaaaccagaccaaatgcagagttgttgagcccattcgcaatggagacatctacaaagcactactatacctgaggattaggaaaccttatggaagagagggagaaaagattgtaggaacctaaggatcaggtgtttactgtgaaattgtgactcttagtaataacagaagctgcactcatgacgtcttactgactgcccaatatgagcttaacaaagacaataccagtgaacataccaaactagacaaggaaaagaccaagatgcatcaaccctacataacaagctatggacaaccgagtaatgctggaattgggtcaagtggtcttcccccaggaaaagcaccgtggctacccaatgccaaattatcagccctgaaaatgttctcacacatcctcctttgccttgctccttcctcctttctacacctgatgcagaaaaggatctgccttttactggtgctttttaaattgagtcagcacagttccctattccagagatactattctttccaatgatggaggactaggaatgttccttattactatgtcgaggtgatatcttttcccttggaattctaaatttttggtaggtgtttagttttttgtttgtttgtttgtttttctttttttgttattccttcttgtgcacatatctacacatttacaacttagaggaacattttttcctatcatgtaaatcaagatatggctacataaatatccttccaagagttggggtttggtgagatttctcagtctctgaagtccttcttgcacaagcataaggacctaagtttggatctctaatacctacataaaaattggaaatgtcagtacacacttgtaatcctggcatcagagggtcagtggtaggcagaaccctaaaggtcactaggcagccagacaaaccactcagtgagctccagtgagagaccccatctcaatgtcaatttgtggtctcctcacatgcacatacacacacacatgagagaaagagggaggggagggagaaagagagagtgagaatttgttcaggatggcttaggaaatcctatgataagattcctgaagcataattcctaggaagatgctaacacatcctcaacacaaagtaccttttgtcattcacaaatgagtgtgctctcccatgggtcttctttaacctcaaggaccatgctggtagaagctgagtggttctatgtcccaaatagaggacacaccattgcttcatcaggctgtaaaggtaagcaccatgctatgatcacagcttcagaagactcagcatcacccacagcatcctgcttactacacctatgtccacagctccctgttcattaggaaacatagatcattccatttcacttagttattttgttaataaaaatgtagtgtggcttatacagtgatttttctgtttgctaagagtttgggagagttttgggtaactttattttattttattttattttatttatttttgtaaagtcacagaattggcattattgcttgggtctacaggactcaccatgttaaagacagaagcatgccaacttgactgctatgtgtttgtgagcatcagagagacaggaaaaggttttgtagagatctctttaaaccaggatcaacttgaaatgaaggtctgagtggtttctgggtggcccagggtgagaacatggcagatcttttctttttcccactttctccaacatggctgctgaggacactctaacacacaagtgctattccagagctctgtatgctgcatactgcataaggggatctctgcatcacttctaatcatggtgtgaagccatgctagcttgatgccaagttcattccactttaaagaaaggggcagtggccatatttaatattttaccaaatatacagtagaaactttacatgataatttaacttcagaaaaactattttatgttgaaaaagtattacttgaaatgctagttacagtagaacattcctaaatttagaactagattgatgttcagtttgtctacctgaacttgaaaacattcagctcttcctgtcctggccgccattggagagcagcagccatggctctgcactgccccatggccatgggcctcgacaagggccacaaggtgatgaagaacatcagcaagccaaaacacagctcgccccacaggctcctcaccaagcacaccaagttcgtgcaggacatgatccgggaggtgtgtgacttcatgtcctatgattggtgcactgtggtattgcccaaagtgtccaatgacaagtgtgcattcaagttcatcaagaagagggtgggcatgcacatccacaccaagagaaagtgggaggagctgagcattgtgatcgcagccatgaggaaggcggtgcccaagaaagattgatgaaccctcccccaataaagatcgttcctacaaaagaaaggaagaaagaaagaaagaaagaaagaaagaaagaaagaaagaaagaaaggaaggaagagaaaggaagaaagagagaaagaaagagaaaggagaagagaagagaagagaagagaagagaagagaagagaagagaagagaagagaagagaagagaagagaagagaaaaaagaaaaaaaagaaaagaaaagaaacgaggaggggagaggagagaaggggaggggagaggagggtaagggagagggggaagggcagaggagagaagagaggagaggaaaaaggagaggagagaggggaggacaaaggaaaggaaaagggaaagaaaggaggaaaggaaaagggggaaaaaggaaaggaagggaaggggaaaaggaaaagggaaaaggggaaannnnnnnnnnnnnnnnnnnngaagcattcggctcttccaggggaaccacaggctgtgttgcccagctggtccctctaattttatattggtccatttgtaagtaattgttgagcatcttcttcatgcaaaggctatggttggtacccaactgaaataatcatagcttagacctgtctctttgagtgaaaaatccattattgaagataatggggaaagtctacccaaaaatgacttagcaataaaactgatttccagaaaaaaggaccacttaggtttaacattgaatggcaaagtctattttaaactcagaattgcttactgagattaaaagtaatgaggctacttcatgtagaagcaggctaggtccatggtggtgcattcttacctatgagttgttaataacttcatatctgctttagaagccaccagtatgtgagactttctttctccctgcatggaggaaagcatttgcatcctctggctcaaacaagcagcctgtatgtctgccgaactaaggtaatgaaagctttacatcaagtcactatcagtcaaagtaagctaagaactcatgtaagacatctgaaacacctcaagatatactctggctgctgaaataatttgccagcctttggcatatcatttgctgatgaattttaaaatgaattacatagattgtgctaatgaatcattgggcagaaacttcactgtatttcctttagcaataaaaatggaaactgtctttctgtgccaacatatggataggcacagaatacctgttggaatttaactcaaaactccctggtcctgatgtgagtgtgtgaagcccacagtcaggtgtgctatgatgaacagagccaagcatttccctggatgtctgccagcctatgagtcactggccccacagaggctctccattccaccttacctcctcaactcagatgtaggaggggcctgcttagtgcttctatgcctcctaactgacagacacagccatcccagaatttttctactccaggaaatgaaagcttaagtaataaccatagcagatctataactggcttgccagctcataaaaacagtagaagcagtaatttggattccttcaagctttcctgctaacagtaccacagtgaaaaccagctcaggaaaaggaaagaagggaggaaaaggagaaatcttgatcacagatacacgctccttcgtacttagacactacacaaatccaggtgagggaatccactgtgctcatccggttcttaaagaaatcatcaactgctcgattgcttctcctcaaccagaatcatctaacaggttttaggatttgaaacgccgagcacatgaaacatactgtagatgcaccaaaacattaaacattatggtactggacagcgtcagaacctctgtggccaacatgaagggcatgaagaatttatgtttggaaactccctcaccaacaccagaaattggtatttggggatctggagattcgatttcctgtaaaagagaaataggcttttctagaaagttacacatattctatctattctgatagcatgacagcaatgttgagttgattctcactggttctctcccttatagcttgcattgggcaccgagatctttgaaaacattgcctgtttgatgtacgatagcctggactggaagaggcaacatcatcactatttgcaaagcatgcagctcatcaatgtcccacaggtggtcagtgagaagaccgtgctagaggcaatcacaatcccagaggtaaggaagcatggactctcatacctatcatcatcttggggatggagtgagtgacacaatgatgtccatatttataaaacatatgaagaaaagactacaataaagtgtttgtgtactgctgcctgttgtgtagaggtgtaaggttagaaacaaggaaacatctcttagcaagaacagtaacagccatgtctttatgatgctccttataccagccacttttatgtcaacttgacacaacatagcgttatctgaaaggagagaacctcaactaagaaaatgcctccataaaatccagctgtgaggcattttcttaattagtgattgatgagggaaggcccagctgattgtgagtggtgccaaccctgggctggttggtggtcctgggttctataagatagcagactgagcaagtcttaatgagcaagatagtaagcaacactcctccatggcctctgcatcagctcctgcctccaggtttcttccctgattgaattcctgtcctggtccttcaatgatgaattaaaacgtggaaccatatgtcaaataaaccctctcctccacaactagctgttggtcatggtgttccatcacagcaatagaaaccctaactaagacacttcttacatgggaaagcacaaaaagacccacctgtcagcttggggtacagtggccagcatgtaaaacaaggggcatattgacaaaatactcctagcgtttgcagtgttagtgctcagcaagatgctagccacataacaggacaagactcctgccccacctgaaggggagtgtaatgtcagagcttcaacatggaatgagaagaatgaaatcagcagacataatcaaaatgataccagccctaattagagtttcagatgctgttacaaaacattgtgatcataagcagcttatggaagaagagttcgtttcatcttagagctctcaggtcacactctatcattggggtaaagcaaagcagaaattcaaggcaggaactgaagtaaaaaccatggaggacactgattactgattactggcccttggagcccagagcatcaggagtgaccccagacatcaagcattgatcttcttacattgataagatctggttttgctttgactcagttgtgactgtgccttggtttttccctttggggacaaagcatttaactggttttgacttcacagaaacccacagtggaaagacattgggcttctgaagagacaaaactttcaagttcttgaaatatttaaagattgtggaacttttaaaagtttgaatgtttggggttgtgatattgatactaatgtgaaatcttgaagtaaacaaaaagggaagtttatttcataatgttgtatttgtgtgtcaatcttaataaaataatggaggtcaaatgccatagctagatttttttttccctttgagccaatccagcactagctatggccatctcagaagagagaatttcaaatgagaaatgtctctcttaattggcctataggcaagtctccatgcattttcttgataaattattgatgttgaagggcccagcccactttgggcaatgccctttcctgggcaggtggtcctgatgtatataaaaaagcaaactgagcaagccagtaagctgtgtttctccatggcttctgctgcagttcctgccctgacttcactcagtgatgtagtgtgatctgtgactgtaagaagaaattaaccctttctccccaagttgttcttgatcatggtgctttaccacagcaacagagactatgaatgactcagacagcaactgagttagagaacagaaggactgagaaacatgaaccagggctagacagataggaatgctgagcatgaattgccaggtgggaaacctgttgggaaaggagtgtataataatattctgaagaagagaggacaagataacccaagatgtggaagctatcatgactcaaactaagaccagggggatattctgtgtcctttttgcttttttcacaccctcactttttaggatcctgtgatgtttgatgaaaacgcttcttttttattatttttctttcagcctccaccatcaactgctccagcccccactgggaagaagaaagcacagtatgaggagtcgcatgctccaccaacaggcatgtgggaaatcaaagcttaagtactcccctctcgccatcctgttcatactgtagtcagcaacccctcccccctacagtgtctacattgattggtacctcacagttctaacttatgcacagaatttcaggaagaactagagaacgcatcttaactgggcaatgtcactttctgcatttgacagtggcttttatcatcacaactgaagtagacatgcggtattacaatgacctgctgaatccaattccagaggaatttatttctgtgtccttgatactgcactgcatggtggaacaggtgagtagaggttgaggcttcctccctgctagcaaccttgaccaacatctctcttcacttccaaactttaggccgattttgtaattgtcctcagaacacttggaatgcagcccatttattcagtcagactatttcaaatataactaagatttgctttaataaccaacttcagtcctctctctctctctctctctctctctctctctctctctctctctctctctctctctctctctctctctcacacacacacacacaccaacacacacattgggctctagaatcattcatttaacattccccaaagcttgggtagaatatactcttaaaactgtccttatatggaggtgctgattaatttttgtcagcttggcacaaactagagtcacctgggaagagagacccagaattcagaatttgcctctatcatattggccttgggcatgtatgtagagcattttcttgattaatgatgatgtgagagagcccagcccactatgggaagtgtcatccctgagcagatagtcctgagatgaagaagaaagcaagctgagtgagccatggaagccatatgcttcaggtatccacattagttcctgcctgcaggtccctgtcatgagttcctgccataagttcctgcctaggcttccctccataaaggactggaacctgaaagccagaagaaccctctcactcctcaagtagcttttggtcagtgttttattacaacagaaaggaaaccaagatagtagggctaatttaatgaaagaagaaaagcacttggataggggctcagcttattaatggcctttaatctttaaatatttatttataaatttatgtttgtgtgaatgcctttatgcatggatgtatattatttatgtgaaggaaccagtggaggccagacaaggcaattatatcccttgggggtgaagttacaggtgcttgagagctgtctgatgtgtgatctgggagtttttggttagttttggttttggttttggttttatgtgtactgactcacttgattttctagacagttacactaatagctttctttactgcagaaggttttagtgagtccagtggttttatcatgtcaatgcataaaaaaaaaaaaaaaagcttgaatctctaaaacctttgagtcttgtagtcttgtgactttatttaccacagactcccgtttcattcaaatcaagtcaaaagcagtgactattctataattgcctgccaagtcccagttaaccagaaggatggctgatgagtccccccactttccccctcatctgacagactacctggagatatgtggagatgaataaaaatctgacagttacagggtaaggaaacaaagtattgaagtaataggatgccacccacaggactagaagtttaagctctgatattcagagatggagcagtttcaactgttcctttaggatgccaataaatccatgaaataattgaaaggtctgaaacagcaacagtagtcagtgttttgaaagactgagtgtcaccaaaggtaaagaaagtgggatttgatggggcacaagaacagtaaaacatctgagacaggatccttccggtcagccatctgcatctgcaagctgaggctgttccacagccccctgtgcccaggttcccccaggaaagacttattctcccaggagtgttttcactcccaggttcagaggtgaaatagccactttctctataataactgtctggagctgggcagcaaagagtacatggaacacaagaacggtgtagcagctgggacaggatccttacagtcaccacctgcacccagagcttgggttgttccagagccctctgtacacaagttctgccaggagagagctggtctcccaggagtgctgacacaggcttacagatccacaggaggaacaagttccagccagagacagcaagaacatctaacaccagagataaccagatgacaaatggcagactcaagaattttaccaacagaaggcaagactacttgccccatcagaacccagttctcccaccacagcaagtcctggattctccaacacaccagaaaagcaagatgtggatttaaaatcatatctcatgatactgatagaagattttaagaaggacataagtaatacaggagaacacaggaaaacaggtagaggcacctaaagaggaaaacacaacgaaacaggtgaaggaattgaacaaaatcatccaggacataataatggaaatagaaacaataaagaaatcacaaaggtaagacagccctggagacagaaaacctaggaaagagatcaggagtcatagatgcaagtatcaccaacagaatacaagagatagaataaagaatctcaggcataaaaagataccatagaagatattgacacaacagtcatagaaaatgaaaaatgaaaaaagctcctaacccaaaacatccaggaaattcaggacacaatgagaataccaaacctaaggataataggcattgaagagagcaaagattccaacttaaagggccagtaatatcttcaacaaaattatagaataaaacttccctagcctaaagaaaaagatgcccatggacatagaaaaagcctacaaaacacaaaatagatgggatcagaaaagaaattccttgacatataataatcaaaacaccaaatgcacaaaacaaagaaagaatgttaaaggcagtaagggaaaaaggtcaaataacatataaaggcagatgtattagaatacaccagacttctcaccagaaactatgaaagccagaagatcctggaaagatatcatacagaccctaagagaatacaaatgccagcccaggctactatacccaacaaaactctcaataaccgtagatgaagaaaccaagatattccatgacaaaaacaaatttacacaatatctctccaccaatccagcccttcaaagataataagtgaaaaactccaacacaaggagggaaatgacaccctagaaaaagcaagaaaataatgttcttttaacaaaccaaaaaaaaaaaaaaagataagcacaaaaaataattccatctctaacaacaaaaataacaggaatcaacagtctattttccttaacatctcttaatatcaatggattcaattccccaataaaaagacatagactaggagattggttacataaacataacacattttgctgcatacaggaaacccacctcactgacaaagacagacactacctcagagtaaaagactggaaaacaattttccaaacaaatgctctcaagaaactagctggagtagccattctaatatcaaagaaaatcaactttcaaccaaaagttttcaaaaaaatataaggaacgatacttcatacccatcaaaggaaaaatctaccaagaagaactctccgttgtgaatttctatgctcctaatgcaagggcacccacattcataaaagaaattttactaaaactcaaagcacacattatactgcacacaataatagtgggagacttcaacaaccctttttcatcactgaaacagaaactaaactgagacacagtgaaactaacagaagttatgagacaaatggatttaacagatatctatagaacattctatcctaaaacaaaagaatataccttcttctcagtacctcatggtaccttatccaaaactgaccatataatcagtcacaaaacaggcctcaacagatacaaaaatattgaaataaccccatgcatcctatcagatcaccatggactaaggctggtcttcaataacaacatacataatacaaatcccacatgcaagtggaagctgaagaacactctactcaatgatatcttggtcaaggaagaaagaaagaaagaaattaaagactttttagagtttaatgaaaatgaaggcacaacatacccaaacttacaggacacaatggaagcagtcctaaaaggaaaactcatagttctgagtgcctccaaaaagaaactgcagagagcacacactagcagcttgacatcgcatctgaaagctctagaacaaaaggaagcaaattcacccaagaggagtggactggaggaaacaatcaaactcagggctgaaatcaaccaagtggaaataaaaagaactatacaaagaatcaacgaaaccaggagctggttctttgaggaaaatcagcaaaataaacccttagccaaactaactagagggccatagtaccctaattaataaaatcagaaatgaaaagggagacataacagcagaaactgagggaattaaaaaaaaaccatcatatcctactacaaaagtctatactcaacaaagctggaaaagctggatgaaatggacagtttcctagacagataccaggtaccaaagttaaatcaggatcagataaagaatctaaactgtcccataacccctaaagaaatagaagcagtcattaatagttctcaaacaacaacaacaacaacaagtccaggaccaggtaagtttagtgcagatcttcaaagaagacataataccaatactcttcaaactatttcacaaaatagaaacaaaatgtactctacccaattcattctatgaagccacaatcaatgatacctaaaccacacaaagacccaacaaaggaagaccagtttcccttatgaatatcaatgcaaaaatactcaacaaaattctcacaaactgatcaccatgttcaaataggcttcatctcagggatgcaggaatggttccatgtaaagaaatccatcagtgtaatccactatataaacaaactcaaagaagaaaaccattgggccatcttattagatgctgagaaagcatttgaaaaaatccaaaaccccttcatgatgaaagccttggaaagatcaggaattcaatgcccatacctaaacatagtaaaagcaatatacagcaaaccaatagccaacatcaagctaaatagagagaaacttaaagcaatctcactaaaatcagggactagacaaggctacccactttctccctacctattcaatataatactcaaagtcctagccagagcaattagacaacaaaaggagattaaagggatacaaattggaaaggaagaagtcaaaatatcactatttgcagatgatatgatagtatacttaagtgaccctcaaaattccacgagacaactcctaaactggataaacaacttcagcaaagtggctggatataaaattaactcaaacaaatcagtggctttcctctacacagaagataaataggctgaggaagaaattagggaaacaacacccttcacaatagtcacaaataatataaaataccttggtacgactctatctaagcaagtgaaagatctgcatgataagaacttcaagtctctgaataaagaaatcaaaggagatctcagaagatggaaagatctcccatgctcatggattggccggattaatatagtaaaaatggacatcttgccaaaagtaatgtacagattcaatgcaatcttcctcaaaattctaactcaattcttcacagagatagaaagagcaatttgcaaattcatctagaataacacaaaacctaagatatcaaaagctattctcaacaataaaagaacatgtggtggaatcaccatccctgacctcaagctgtacttgtgatttaaaaaaaaacaaaaaacaaaaaactgtgtggtattggtacagtgacagggaggtagatcaatggaatagaattgaagacccagaaatgaacccatacacctatggtcacttgatctttgataaaggagctaaagccatccagtttgggggggggggggaggagagacagcattttccacaaatgatgttggctcaattggtgggtagcatgtagaagaatgcaaattggtccattcctatctccttgtacaaagctcaagtccaattggatcaaggacctccacataaaaccagatacattgaaactaagagaagagaaatcggggaagagcctcaaagatattgccccaagggaaaatttcctgaacagaacacaatagctctaagatcaagtattgacaaatgggacctcataaaattgcaaagcttctgtaaggcaaaggactctgtcaataggacaaaatggcaatcaacagattgtgaaaatatctttaccaatactacatccaatataggtctactatctaatatatacaaagaactcaagaagttaaactccagagaaccaaataaccctattttaaaaatggggtacagagctaaacatagaattctcaattgaggaataccgaatggctgagaagcacctaaagaaatgttcaacatccttagtcatcagggaaatgcaaatcaaaacaaccttgagattccacctcacacaagtcataattgctaagatcaaaaactcaggtgacagcagatgctggcgaggttgtggagaaagaggaacactcctctattgctcgtgggattgcttccctgtgggtgctttgcagtaagtggaagaaattggttcagacaatgggaagggggccacttgcatcacacagatgctgaagatgccactaaatatgccagtgtgcagggcaccaccccctgaaagttccaaatactcagtgcaaaatgtcactactgcaaaaggtgatcaaccttatagaagaatacaaaattataacaatgtgaatatttaaaggcaaaggggcctgtggagcaggtggactgtgccatcagtattttaactggtaaggttaaaataaagcaggttcaaaacccctgtaagtcccataattaaaagctataggtgttagaatcagctcctggccagactctacctgtcctggggcatgtgaccaggataccccactaagaggaccatgacaaccagtcacatagtatgaaaacctggagttctccatgctaatgaggtatctagataagccctgagtgtttagccaatgagtatcccttgctaggcatcccttcctataaaaggtatttaattcctggttcaccctgactaagacatgtgcattcatatctgccatgaatagaacagtttggacaaagaagaaccattgtctttatcaagaatcacctcagggagtggggatgccttcatcataaagagctgtgcctacatctcccgtgaaaggcctctcttccagcccctccatacgtttggcagttccttggagccaagccagattctaccctgtcccaactcctcatgggtcccagtggcatctgggtacacaggagattgagatccacagcatccttcccagatctcacagactgggaccccttcttagactgtgttctgccccctgagtgacattcctgcagtgctccagttctgagcagtgaggcagaaacacagacagtcagaagagtgcttactggatgtacatgttgggtctttggttatatttcagcttattttacttgcccctccccccgaagcaaacttgaacaaggcatttaatctttctaaacctcgctttgccctcattaaggtaatgattatctaacacttatcttaccatttgacagttttctatatttgaaaagagaaatgagggcttggcctgaagtccccataaagttcaaactgtgtggaattggattgaccatgtgagtcacacacctctgctttatcctctagcaagcgggaaatgctttttgtgccaggtagtgaccatgaggctcaggggagtgaacgtgtgtacagatgtcccacagtaccaggaaggtggcaaccacgctgcttaaatgtatattgaatccaaagttttatgagcaccatcctcagagcctaacaagaaagaacaaatacttttaaaaaaatcagtattgtaacttttattattattcctagcctatgttatctattttaaggcagttgttaaaattacatctaatgcgattacggatcgcaaacattttctccttaatttttgcatcagtgatattttactgccattaccaccaatgtttctatggagctgtctcctcctcattaagagcaatgggaacacatgcacatcagcaaagagctgagtactaacccacttcttccccattgcctttcctcaataggttgtagcaactgaagaagatctcatcccgccaagtttggtggagccagcccccagagcagacgggttagactacagaatcgcagctcacattgtgtcgatcctgccttcactctgcctctccgaaaaggaaaagaaggtccgaacacgagcgagccaaaaagcttttgtactttgaaacaaacaaagtgtgcattctctcattaaattgatattattttaatttaaacagaatcttcgtgagatattcttaactgaaggagagagtgaaagcaaagccctgcccaaaggtcccctcctactgaactaccacgatgcgcatgcccacaagaagtatgcactgaaggtaataaccaggaccctccctctcgtagttcatgtaagtaggtgtgtttgtgattcactagttgggggaatctcattggatgatcttaccaaccaatgctaatgagatctcatgtataggatagatgaagatggaggctcagaaacaggagtagacaggagcaaagtatgtcagcaaagagcacttggcctaatcacaggggtccagttaaccacgggcttgattgtcaccaccattacatgtgcattaaagctttataatcaagtacttaaaaattaactgagaggttaagagtacttgtggctggtccagaggacccaaggttaatgtattaaacccatgtcagagaactcagaactggggctaactccagctcccgggcctctattctggcctccaggggcatatacacagagacatacacatatgcacataaatataaatgattctcgaaaaaaaatcatgggcattttctttaaatatctgctgctatgaaagactagtgtaggccaacaaaggatttcaggaaagacagataaatccactccaaacttaggctgcttgtcaccaggaatggagacccacttgtgctccagaaacttctggaaaaatgagaactagattttggaccttattataaatacgaatttgtcatcctcaattacttgtgatgttccctgtttccagatgagagtgacgatatcacgtttggccttctccacacacataaggcatgtgacagctctcgttagtgtcttctgtcatgttgctttccctgtttctttttcttttcttcttttttctttttctttttttattttttttggtaaggaccaaaagaattttgacccggttcaagttgagcaggagatgcagtccaagctgccactgtgggaattccttcagttccctctcccccctccatggaacagcactaaacgactcgccactattcacgagcttatgcatttctgtacgaacggtgagtatcttgctttggctgatacccaatttaattaatagcccttaaattgcacccttattcccaaaaagcattttgatcattgaaaggccttccaggggccttggcgatgtcactagccatgtggaaactctggcgcgtaacattatgcactttgatgtaatagattttctttccattgtgttttcttaatcccctgagccccacagttccccctggtgtcattagagacgatgcaatccatcctacttaccaggaggaatggttcgtgtttctgcaaaaacttaaaaatgaacaagaacctcttgtctcaagttaccatagtccctttcccagaaaatagacaaatagacagacagacagataggtagatagaaacagatagaaataaataggcttcaccaaggaatggagccctttatcattgtagaaatccacacaagtcatatagcacagtggcattagctgtggaaggagaagcaaaagcccgagcaggagactttgccccaactaagcaattatcagtctggagtctcatcctccagcctcaagcacacaggtcgcttttgacttctagaactgtgctcaaaggaaacttgaactatccttgtctctagcctgactcgatagattggacacaacacttatatgtgtctatctagctgtactgataaaatgcaatcactgaatgattctcagtagtagattgggaagtctccaagaaacttgcatctgcaccccatcccgaggagcacaaaggaaaccctgtcagaagcagatctccaccgcttaagtgggaagctgagtttctactcaacatttgacagaagatgtcgaagcctggaccatctctctgtttatccaatcagatggttatcctggggctttcccactagttgcaatgtggctagggtgagagaacagaagagatcatgggtggtggttttaaatacaaacttctcttgtcagtgttctttttagaatcgaagtgttcaattccctctgcatgtctctgcctcccaaatccttttgagagcttccctaaccgagaatcaagaatgtccctcatctgtctttacaaagcaagtttttcagaacaaccatatatcttagccatgctcccttctgtgctgagaaatggcatgcggccaattgttttcttctctatactttgagtcactccacagttctcctttttttttccaggttagaaaaaagaaatagaaggtctgggtcatcagaatttggctggagtgtctatttagtatattgtgagcactttgttagatcacccctgcataggagggcgggaaggaaagaagaaacggtgtgctctggggggcaggagagcaatcgaaaactcctgtccaatgctatcctgagattgaattcagaaaacagtatttatatccagagatttaatttcattttttaatactggcaattgaatctatgactaggcaaatgctagacagtttccctaccagtgagctacactgtcagctacagaatttgaaatatgaagatatagtatagaatcataaaaatctcctggctcaaatgaacattgagacttacctagtccaaatgtatttccatctcataaaaaatccgaaatcctggcaagctaaaccatttattgtagggttgtaataatagtgtcgacccacaagggaagttctggcccctgggtggctctcacaagcatcctttccttatgttactgagctgaagggagggcaaacatcatatgatgtctatttgccttcttggtgccataactgaccctagtcctggggatagcaggttgaatacacagccccttgtcagcataccactaaagaattagcaagagtttgctgaaaggacctagatatagctgtctcttgtgagactatgccggggcctagcaaacacagaagtggatgctcacagtcagctattggatggatcacacagcccccaatggaggagctagagaaagtacccaaggagctaaagggatctacaaccctataggtggaacaacattatgaactaaccagtaccccggagctcttgactctagctgcatatgtatcaaaagatggcctagacggccatcactggaaagagaggcccattggacttgcaaactttatatgccccagttcaggggaatgccagggctaaaaagtggcagtgggtgggtaggggagtgtgtgtgggggggggtatgggggacttttgggatagcattggaaatgtaaatgaggaaaatacctaattaaaaaaaaaagaatgggtagattcaagctaacctttccccatgagaggaaggagagtaggagggaggtgacattctagaattgaggataatcttggggtgtggggtgtgacgggaagttaaagaggaacaggggaaagagcatgatcaaaatctatttgtatgcatgcatgaaagtctcaaagacttttttaaagaaaaggaaattataaatcaatgtttctaatgaatgtaggtattaaactcatcaaaaaaaatcttagcacaccaaaatcagcaacacattaaaagacacacacacacacacacatctaaaatcccatctcatgtcggtgtactcttaggactctgtactgcagactataccctgcagtcaccctgcttcatttttacttacaccccacacctaccaccagactgggccatcaccctgggctatttcagtggctttccagctacattctgtgctttcacctctcatttgtgaatcttttatccatggaaggaccagaacaccctttctgggatgttcatcaggtcttacatcttcttcaatccaaatcttctaacattcatccatttttcaaaaccaatgctatcaaccaggccctgagaagaccctcccctgccagtctttcattggcctgttccactgtctacaatggccttactgcgtccttgaagcaccagtcatacaaaagcctctaaaactctgtccttgccaagttccaagcctcttttcacatgttccttctcctttctcatttttgtcttgttatctaaactctccaccccgccctgctccgccccatcccatcccagtctcctgtgtacagtaagagcataccctttccactttcacttcttatgtcctgattggcttcctttgtcatcatcatatgctgtcgggtgtgtatttgtctctctttggccactataatggtgttgtatggcagctgggagccccatcactttattcaccagctttcattgcagttgctaacacccagtggatactcaggaatgtatttattattattacttctgtttgtctgttttggggttttgagattaatttgaggttgcctggaatgcatgataatcctcttgcctcgggctgctaactactagaattttagttgtgtaccaccatacccagataaaaacaaatgtttattccgtaattcctttgcctctttcttgtttctcttctggatccctatgttgtttttctatgatgctcaattcatcttaggggtggggtacacaggatgaagatgatctaggagtcactaatccagaacaatctatttgactgttattttactgtaacctcattaagttgttttttgttagtctccacctctcaaacttccatcttgaactctgaaagtttgagaactaagtcatgttcttccttgaatcttaggcatctgtagcaaagccaggatgtcactgatagcttagcgactatatgctgaacacaggtgaatagagacaactgatgaatgctaaagtgcaagcatgaaaattagcacttcttacatttggcttcttctgaacctgaatgaatagaaaaacctaagtatcataacctgtagtagacacaatgacgaattctaaaaggcaatctatgcccataaaatcttaaatatacgctatttaaacgaatataagtaacctggaaagttcaggcacgtgaatatgggtaacaaacattgattaaggttatgaagctgtttttagggagtgtcccttggatctcttatatcttttttttttttaatataagagttttttttgttttgttttgtttttaaacacagggtttctctgtgtagccatgactgtcctggacctcactctgtagaccaggctggccttgaactcagaattctgcctgcctctgcctcccaagtgctgggattaaaggcgtgtaccatcattgcctggcagatctcttatatcttaactgtgattttcttagttcccatgcctttgatatttgttgaagacttctgaagcctgtatttaaagtcaggccagcacccgtgatgacatgaacccttggtgcccctcagcccctgtgtcagccttgtattatgcactaacaagagccgttccctgaggcaggggtcatgctcttttacagaagttctgagctggaatgaagtagaacgagccttcaaggtatttacttttgagagcctgaagctctcagaggtggatgaggaagggaggctcaagcccacagaaacgaccagtgacacagatgttgaaaatttcaacattccttgggacaatcctgccaggttcgctaagctgataaggcagcggtacattcacaggatgagcatgcagaaggccccgccagtagtagtaggtacgctacatggaagggagcgggtggggcagccatcctggcactgtgactaatggatgctcttcatcccgactagagattgaaaacactgagagaacactatttgtgaacaagaattttgccaaagctgagcaagatgcacaaggagatgaaaattccccaaattctgacgagcctgatgctattagtgtgacgggttctacttccaactccacaaaaccctggaattctagtaatagacagttctcagaaaaagagaccagtgggtccatgtggccccagccagagtccatgggtaagtgaaagtgtgcataggctctgctatgctgagacagaaacaaagaaacaagttcaaaaggtatcatttaaatgtaagagcttcttcagctgatgagaaagattcagtatttaagttaagaaaacacactgagtcctcccttttcaattctgtttttcaagggatcctctcagttccctcttcctggtgaaaactcaaaaattaattgagttaattaactaatccatttaaaatttaaattaatcaaacttaaattaattaatacagcaaagaattacatattcaccatcagtacttcataattgcttggtaacagtactttaaaattacatataatgattgaacaaaatgccaagtatagaatctgtcatgagaccagaactctgtgaacgtaccttcctctttgcttctattttagttatggacattactcttctcctcgggtacaatcctgtaaataatgctgctgggaggatacagaagggcgctggattaaatgtgggtgtgctgccttgtgcactgctgtcagcagcctgcctgaggcacagctcctgtattccctgcacatcactctcagcagcagccccctactagacaagagtgagccctgcttcacacacctctgctacagcactccttatcctaaaacctctttgcgttttgtccctttcccctacattctgtgctgtatccaagagatgtcataactgagctacacatcccttacattgttacgccttgctattttctgtaatcatttatatgcccagtgtgccctccacagccacagcttgttgaaggtcgtaactatgttgatttatgaaatatcaactttcttttgggctgtgcaaaattgcagcaaatttacagggctgaaattacacagaacatatattctcataatacagtgacagtggatgtcagttacaaaagtgatatggaagtaccatgtgcctgaaattaagaaatactcatacatatccacacctcggtaaaggcaagggttacaatagggatttggacctatttcaaactgagtaataatgaaaacactgggtgtaaaaaaatatatagaatgcagctaaagattctgtctggacactgacggctttgaattaatgaattccaaagaatctgaaaatcaaaaagttaactagttaaactcaacctcaagttatttagctatatgcaaagggcacagtaaagaaaccatcaaggtggctagtccattactacagggtaatttgttttaactatgtgtgtatgtggggggggggggagacagagacagagagatagagagacagagagagagacacagagagagacagagatagggacagagacagagacagagagacagagacagagagacagagagagactcagacgcatctggaaaagtctagagttgagagaaaaaggaacagactggatctgaccagtgctagagaaacagaacacgagaaaagaaatcatttatgttataaggaacataaacatctgggaagaagggagcctgtgagctgcagacagcctgggagttcagggtaaagggggaggtgagaagatgaggggacttggaatgtgtaactggtccttgtgtttggggactgaaggagcctggagaccaggatgtgtctatggaaagctctatgtcccttctgcttcctttggcagatagacagacaggcagctgtttcacaagttcctgaggaatgctggcttttatctaaccaacagaaatccttctacaggtgtgggttcttagggatacctgacattaaaaatgaaaagagtacaggggatgaagtcagtggtggagccctggcctggtatccccaaggctccaggttcaatccccagaacagaaagtggaggcaaacaattttattctactaaatttaaaaatgaaatgggcaaattactgaaattttgaaatttagcaaaagtgatcaaacaagagaaaacctaaacagttttgtaagcaaattatctagttgttcaaaaaccgccctaagtaggacattaccagcctggaagtggtatgccattggcaaacgatgccaaatcctcaaaagcacagactactataatctcaacaaaaattattccagaaaatagaagatacaatatcctcccttagtaattgtgtaagattatcataaacattataatgaattttgcaaagatggtcagaaaagaaaaaaaatacttagtaatgagcatagatataaaattctgctgtaaaatatgagaaagcctaatgagagagaagacaccaaacaataatagtatctcccaacaaagttacattttaagatcaggaggaaaatacacttaaaaaatatgacttattaattaacatattagtgaataaaacatcagtttctagattgtaattataaaaacacttaaattcctatggtaaccaattaaaaaagtcttagtgaacatcaattttatgaatgttgttcttagaacaataaacattatatgccacagtgaaaatagccctttccctttatgatctgggtgcatcccaggctagacaactcatccacagaaagtaagataaaagtatggcttcaagaagaaagaaacaatgtatcactatttgtaactatatgggaaccgaaacaatccccctacacactcaggttacagctgcagagatcaccaaaggagccggtgttttttaaagggtgccaatgggactttgatgtttgttgtgtgaaactgtcatactgtgggatctttcctgtgtgggtgtgttccagtgtacagtaagtggtaaaaaacatgttaaaggtacctgcaagcacccccaaaactacaggagttaagctggtgttgactctggtgatcttgagatatctgaatgagaggcgaagaaaaggtcagaagggaatagatttttcaaaggtggcctgctagccgtcagcaggggaagtattggaaggagagaaaacagaagttggtgctgatttagcctcgctctgctgtaccccaagttccatgcctcagcatgttactgctttatagaaaccctgaacctatacgcaacaagctatcacctcagttcaagagaggagaaagccaaagcaaacagatttaaatttcttgtcccaccacatacagataggaaacagaaaagcagtgccctctacctcacctcagaacaaggctccctaggccccagaaactcctcatgatgctccctaatagtttggtcatgtctgaatttctttgtcttgctgattctttttttttaattaggtattttcttcatttacatttcaaatgctattccaaaagtcccccataccctcccccgtcccactcccctacccacccactcccacttcttggccctggcgttcccctgtactgaggcaaattcttatcccttatcctggtttcattgcctgtttcttccttcccaacagtagattccttctatgtcctaagtatgattacctggtagcctcgctcacaacacacacacacaggcacatacacacacacccacacacatacacacacacaggcacatacacatacatagaggtatggggagagatagagagagaagcagaataagttaacactgtttgttaggatatcatacctcctggatgcaaacaagcatatgatagaggtcactttgtgttaccatggaaccagaatcccctgggagagcagcgagtagacagaggtgtttgtttagctctgttttgtttttctgcaggcagctctccagtagagctttctttccccaggcaacttttgccaccttgtggtcaaaccactcacatggtgtggtggagccattggagagtgaaggactcggccactatcaatcgtcaggctgaactatgacttagagagtatgtcccaagaacccagcgattttgagggtggattcctagtcctacaagcttcctcatggagaatgcagacttgcactcaggagcactcagatctgagcagaggaggtggccaaccttgtatgtctgtgactgttcccctaggaggatgacgatgatgtctgagcatccattttcttcctaactctagttcatacttcaaaagcaaccactctaattccatttaaatgaagcagaaatcttgtctgtgtttccctgcacaatcactttggtatcatgtgcactgatgtgcctgtttctggacatgaagggctgaatatttgtccttctcctcaccaaaccctgggtttccatctgagactgtttttgaacttgacagggcccactggatatttatgaaaaacctgagagttgataaccataaggctgtaggtttagatgtgccctttatgcttgttgggtgtttttttaataaagtaagcgctttgcagagggatcttgttatctctaaagtaaaacagattaggaaagctgtttttcaaagggacggggaagcgtccatttccagatgtgtcaaagactactgaatcacactgtcaaaggattatgtggttgaaatcaggaatcagacaagagagaaataaatggcttttattctactgtgaaatcaggagctcagcttagtattaaaatgttctttcctttgacaaaaatcactggtgtataagttttgaacatactttctaaagagttggttttgttcctggatctttagacccaagagggaatatcaaatctctcagaaatctggcaggccataggatagaagaatttttattctacagatttcatatcaattgctccaaagacacaggggacatcatggtctatttagaatcatagttggcctgagttctgtcttcagtggatatgtttgtacaaatgctgaactaaattggctttaacatcttctgctaagagggagcatccattctgtcacctgcaacaactgagggacaaaaggaaacaaggaccaaagatgtacatagatgtgctcttgaggtagaaaagcattagccagtccttggtaggcatgggtaccttaccactctagaatcccatgtgtgggtctctttgcaacaaaatgaaaatgtaagtctaatgcttactctcagaatagcctttcaaatagatttgcttccacatttctgttttctatatggctctgccatcccttctagtttcatatgtcacatagattcaccccattcaatccgaaggaaaaaacaaaacaaaacaaaacagcactgactgcccccaccccccaggtgctggctacatagcattcactgagggcacagtcttgttctccagtgacttgaggcaaaggggcagaccatgagcaaataggatcccaccccatcaatgctgtgatttataatgaagcacagcaagagacagaagttctcaggaaggtggccagagtgtgaaacaggtgaataacttagaagaaaatttggcagacagaggaaaagccgaatatagaactgcccacacataacaagctggccagtcaatctgaagtgggaaaaacaagagctgggaggagtgtattggaggagggaggctgcagtgttttgcacacagctttgtagcatggaatttgcaattattctcaagccaataaaaagccaggttggctcagccactcagcaacaccaaagtatgctcccaaaagactttcctctcaagagtactccatttgtttcatcagatgtgggggacatgacagtaggtatttcctcaggattctctgtggtgtcttattaaccctggtgcacttcatgaggtaaaaattgccggcatagacctgctcctttctcatctattcagatggctgctccttcctagctaaggatgctatcactcttgttcatggggtagctgatgtgcctcgctcctggcagggtacactggaacccaggtacccactgtcttacccatttaactgatgcctgttaaactctacctggcaatgtgcacaggctccttaaatgatacatcaatgagtggccagaagatctcaacagaatgatagaatgctaccactctaacaggtgaattcattcctagttatcctgtttatatgacctcacccttctgtcatctatcaggcaaagctcacagaagtctgcagaggctttgtaagggtcaccagagggaggtgaatggacacagtgaatcggtgatctagcttagccagtaaatgtttgcagtttgtgaaggcaaaggctgcactgaaagaagtgagcaatatgcagtccaaaggaagaatggctggcgtgatttagtgcacatcagattagaagccaggttcttttcaaagactctaagtaggcactgacttagaattatcgacacaaacacctttttggaggcacgaaacctgcctctcaggaattacctttttagcacggaaacatagatcatatgggcaaccaaagagccacagcgttggacagaggcaagaacaaagcccaaacacaactgcatgttgctgtctttgatttacagatcagaccatggacactgagatcaaagatgacgcagccacaaaggatgattctcctgaaaaagtaaggaatcattttccttaaagtgtagatgacgagtaagatgatctgagaaaactcctgaccaaaaggtggggggggggggggggagacagagacagagacacagagagagacagacagagagagagagagagagagagagagagagagagagttgtaaaaggaaaatgttgatgccagggtgatgttatttagacatcccatcccaaccccatctggagtgaaaggggttaaacttactagcctcactaactgaagtaaaacttcccagctccctgcccctctctagacagtgtggcttggcaacctcacaaacacctgctgaccatacagcccatgtagaactaacactgtcttgaagtgagttcagaaaacctgcctataattgctaacaggactccgaagagtataacctaacaataaaaatatttaggttatgttgcacatttgaaaaaaaaaaaaaaagagtcaaaggcgtacttctttctggcagcagccctcctaaaatgttgccatatggcgctatacatatgcagattcccacaattaaatggggcgcatgggggtgagtccacagagcctaacagggctccatttggactcacataaatttgagctgaaagtgtgttcctgtgatttcttctttcttttttccttcctttcttcctttctttcttcctctctttcatttttttttttttttaagaaacccaagaagatggtggtggaagccgacatagaggacattaaaaaaacgcaacagcgcagtttaatggactggagctttactgaatattttcagccaaaagtcctgcttcaggtatttatgggctgtgattctccaggagaggcacagggatagttctggagaggtgagctgtaactgtgaacagttcacttctgagctgtgcattcccaggaaatcccccaaatggttggaaatacttctgcttccataaagacatctgtactaggaagcaatgccatcccctctcccctctccccactcctcttctatttagacttcattgtgcttcatggtgctttctgttttgatgaactggtcaatggtagctgtgatagtcggctgttactgcactacgtgctgtgtgctaggccttggctggtatgtattgtaagtgtattcctaggaataagcctatgacatagaaattgttaagtcgtagataccaaggcaccttgaccaaaggtctgttgctaagtgagaaacaggaagaaaacaaccaagaaaggaatgtgctccatccaaacgtgcttttcactgctataagaaaaacaatagtaagaaatccagaaatgaacacgtgctcattttagattttgcaaaacctgtgctcagaggatttatctttctaatttgaatctcattttgatcggatttttatatcccagtatttttaaagccagaagaatctacaaggccatgttatggaaaaaattatcaacttctgaaccttatcaatagtaaagaaaaatggtcttcttcataaaagaaattaaacaaaaaagaagacagagtcttatggcactccacccacatgtagctataggggccaaacacactaaatttcaaagacttgacttggcacgaaataatgatatatcttgctcataatttttatattcactatacatgggaatgatagcatttcatatattgaatgaaacaaatacagattttacctgtctcacttttcaaaatgtagcaactataaaatttagaaatacatgtgtggccccatttgtgactcatttttgtgatttagacatttacattatttctgttttctccccagtgtgcctctccctcagtgggaactagggtcctctgctctttatccccctggctcaccttctatgggttgccacctgctcttctgctgcagtagggaacagacagtcgcctcataaactagactgacaagggtacctgtgaggtctcaccatgtcaattttaatttacccccatcctcaccttgtgttgaaatgtcctaactatcagactgctttgggtttcactctggtccattctctataattcaaatatttcactcacttgatcagaaggcagagagacctgtagcaaatcttactccaatttaagaagaaagttttgtttcttgtattcatttgtgtgtcctggaaccgtgcctgacacttagctctctttctgctgatcatttctcgctgtggtggatcatttcttgttggcttccagttctggctatcaaccccaggcccttgcttatatcagacaagcatatcacagtgaattacagcaccaccactgttcactattcgtgaactacatgagaccaataataacgtgtaaagagcaaaccccagtcggtcaaaaggaaagataatgcaaacacttcaaatgctgagaacctgtgatggcttggaaatctcaccactacattccccaacagtcaaagacggcagagctgctgttgtcgaaaaggaggggcacatgttcgctgtaagcaaacacttgtttcctaggtttatgtctcagaggaatttgcctttcaaaaatagtaggtaaaaagtgggttgtaaggcaattgtattttaactgcctaagaaaacagatgtcaacttttaagagactctgcgtggaaacactcatacagatgactagactggaaataaatttattatttacaatttattactagtatagaaatggaggcacaactgaaacaaacttttcctggcagtgcttgcaattcactgagattatccgcatggcagaacacacaaagctacatacggtaaattggcactgaaaacacccccacggtgtccacttccttttcctgtggacacattccttcttgttgactgacactgagaagaaaacaggacacgcagtgatgcctttgtgccctctgcttgtggctcccactacagtgcaggttttgagtgttatatttcataacaggccagaggtgtagcagcatatatcagaaagaccatgcacttcatgtcactatagccatgcagtatatagaaggcacagagagagagagagagagataggggagagagagagagagagagagagagagagggagagagagagagagaggaaagagagagaatcagagctggaagatagctggcttcaactccagaacctacaaaaccctcttcctggcagctcccttatcatgctggcaaatgagacctgatatttagaaataggaaaaaaaaatgttagttagtaccttagtctactcaggctgccataacaaaatacttcaggctgggacacttaaatagtagaaagtgtcggcatgtaagatgtgtgtactggctagttttgtgtcaacttgacataggctggagttatcacagagaaaggagcttcagttggggaaatgcctccatgagatccatctgcaaggcattttctcaattagtgatcaagtggggaggtccccttgtggatggtaccatctctgggctggtagtcttaggttctataagaaagcaagctgagcaagccaggggaagcaagccagtaagtaacatccctccatgacctctgcctcagtttctgctttctgacctgcttgagttccagtcctgacttccttcagtgatgaacagcaatgtggaagtgtaagccaaataaatcctttcctccccaactgcttcttggtcatgatgtttgtgcaggaatagaacccttgactaagacaatgtgtaaaaacaaaatccaggtgtgagtatggctgggttctgatgggacttgtttcctgcctggcacacgatactgctctgctgagatattcatggcagagagagggaaaagagagagcaagctctccagtgtctcagatgacaaggacatagatgccatagtgagatgctcaccctcaaaacttccccaaaagtcctcaaatctcagtgaattacaagttcagtttatgaacttggagcaggtcaagctcatcctagcgtatgatgccattttatctacaatatttaataatgctaaaaatgaattgatctatttggaagcaaagaaaactgttagattaactgattgttatctactaacacttgtggagagcacttagcaagtgtctccacccccgaggcctacttttatttaattctcattttctagtagttagaaaagaatccactggaaacccagttgatcaacaatgtggtaatgagagagggaaagtagggtgagggatgctgctctagcaatcacctcttctcttgggggtaggacaatggagcaatactattcattattctaccttcaggttcttcaggaggctcaccagcaataccgatgtgttgactcttactaccacacgcaggataactctttacttctggtttttcataatccaatgaatctacagcgtctgcaatgtgaacattggaatattgctcttcactccaacgtcggattcaggtgacttagataattctgctaaattttggctgagtttgccacataggttttggttccttgatctggtctttatggctcaactcaatgaaagcatttatattgtggcatagattcaactgagctccctaaattaatatgtatcatgtgctatggttgtacattgtgcttacgtattgacactatagtataaggagtgaataccactcttgcctgcatagaatctaatagagatactattaaaatagtttccattcatttcaaactgtaataagattgagtctgtgacactgaagagacaactactaaactcttggttctctgatattgttagctctagtggatctgaaaaagagtccagggtaaagaaactgaagactatcaaaacacgtggtcaagttcacaggaggtctaagagccacttagtctttttaattctcagtagttatttttgtttgttttggttttgcttttcatttgtgttcccttagaacgcagccctctccttactaataacctatgcctcttgttatatcaatgctgtctaatgcatactcagtacgcactgtatgtatagcaatacaaaggacaaataaagtggacctgaggaataaattggggagcaaatggccataaacacgttcataggaaggttttaagatgatttagggtaggtagtaggtatacttgtactattagtctgtattgctcttttttttctaacaatatttttattgattatttggggatttcttatcatgcaacccaatcacactcacttccccccaccaaaaaaaaaaaaaaaaggaaaaagaaaaagcaagtccaatttgtgttgtccatatatctactgtaacatggtaaaactcctggtggctggccccctaaagaaaagtaagtctttctccacccacacccttggccagaagctatctatttgctacatccatcatccttatcacaataggtaagagtcctcttcggtggcttcctttttaggctgttattttgggtggggtaggggttgtcattgaagccttctctgtccttctctcacaactgtgtgtctgaggtcatccgtaccactgcaaaagtagcctccttgcccttttcagtcagcaggagcctggagcctgggcttctgtgtggtttctggcaacagcatggacacaaacacccacatggtctccatcagcactgcatgccaaggacctctgtttggtctctggtggctgcacaggccactcaggaggtcatcactggccctggctatagtagaaccatgagcacaaaatgggcttctgcagcggtacagaccacgggcatccacatagccctccagcttaatcacagcctggggcagcagtacaaaccactgataccaccatggccttctcgagaagcatggaccatggaagtcttttgaggaggtccaatctaagaagtgaacaattgttcatctaagttatcttgtcattgctcagaggcaggcagggtgaacctgcgactgtgcagctcattaagggactgggtctgctcaagtgccacactgctgcataccactctgctgaccctactgggcaacaacatgttcttccatgggtttctgccttctctcccagctgccacatttgtagctcagcccatgtccactgtgcattcactgctctgttcctctgtcttttccacgtcttcctcacatactcgttcatcatggtggcactggaagcagcattatgtcactcagtgtgtgtgtgtatgtgtgtgtgtgtgtgtgtgtgtgtgtgtgtgtgtgtgtgtgtcaaacagcttaacatgtaaatgttcattgcaatgagtcattggtctggttcaaggcctctggcttctaccacaccatcaatattggaccaccaccacccaccactgaaactcttctctgatatcctgctgttgtgcagagtcaggcacagagatcctgcagctcttgttctgcagcactggctctgccatgcactccagcagctcacagatggagtatatattgacatagactgactcaaagccctagatctgggtcggggtagaagctgagttggtcatcccagaccttccaccaccagtggggccttccttcactccccattctttgtttttcagtgacaatgtttatgcttcgtttccttcctagcatcacttgactattggaccccagtgtaactctgagagagcattccctccactgtaaccctgagagagcactctcatattgctataggagttagaggaaatattttgaggattcaatgcatagggatttttgttaatatcgctcatcagttaaaaatgttactctttttctacaacaatggacatattcatatttttcttttaagcagtgaacctgctgaattttaccagtagctcttcttgtgttgaagactctcattgctcaagaggactctgcattgtgtttctttgctttgctaatgtactacttaggttatccatagctttgaatgagcaaggcttggctgtttaatctttaaatgtttttatttggctctgatatacatggtatagaattctcataagctaactggggtggggaaggtccctgtttatttccacgttttattttttggaagagtttgtggatgactgagatattttcctttgatgactggtacaacttgataataaaaacaactgcacctaggaaagtgtttagacactcatagattttctattttacttttacaattcttaaattggattttaaaagccaaagcagagtggcattacccatgtaataccagctcttgacaggctgagtcacgagggataccttgagttcccaagaagccagatctacctacctagcaagactgtctcaaaaagttaagaggaaaatgcactaataataactatacttggggttggggatttagctcagtggtagagtgcttgcctagcaagtgcaaggccctgggttcagtcctggttgttttgaaaaaaacaaaaacaaaaacaaaaagtctacttacaaaaactcattaatggtcgaattctatagaaacacatcctgacatcagtaacatgatgtagacaattaaggaggaaatggttttatatgtgaccaaagtaaagcttttcccagcctaaaatacattgtcgcacgtgtaggaagttttgagtgaatttgatattaaccagcaagcaaaatctataataaacacaaagaatacaaagcaacaattaccaaagcagaacagctcaaaactcagagcatcagaaatgagtaaggaacttctgagaagaaaagaagatgcataaaataacaatagtgaatccttacttatcataccaaatacaaacgtatcagattatccagtcaggaggcatagggtggatggatagatgataaacgatcactgtaagttgctacagaaaagttcacttaagggagtatagagatctaatgtgaagaaacaagaaacccgtgctccatgaaaatggtcactgaagaaataagagatgttttcacctttaacagacaaatagacatcaaataaaaatatttaagagatgaacaacttcatcactctttcaacctaatgctggaagtgctagctagagcaaacagacaaaagagagaacagaaggcacccagattaacaggaaaaagtaatgaggtattttgtttacagatgacataatctcataaatagaaaaccttaaagaccacacacacacctgctgttagagatactaatgaatttagagatattttatgaaacatagaaaagttagttgtattttgatgccttgacaaagaacatctaggaaagaatataagaaagcaaacccttttcacagcatcagtaagaataaataaggggtgagatatctatacactgaaaaataacccagatgagtgaaaaggtattctgtggtcctgagctggaagaactaattgttaaagtgtctatactacacaaagtgatttccaggtttattttactcctactaaaaatgataacattggcctgaagaaagagtacagtggttaagagtacttgttgcccttgcagagaacttggggtcagttcccaggacccatagtgtggctcacaactatcactcactctagttccagaggactcaacatcctcttctgacttctgtgggctcctgtatgcctgtgatgcatatacatacactcaggaacctacacacgcaactaaacaattaaatataaagatatgatgtcagtttgtataaaatatataaaccaattctaaaatttgtataggataaacactaattgcctatgttttcagtacctttaaggcaaatcctttattcaagttttctaattctttatttggtatagataaaacacattttccttatgagtaatatataacctatttaagcaaagtctgttcatgataaatatccatttcttaaagggatataataatgtctgtccttaaagcaaaaaatttgtgttttttatctctctctctcctctctctctgtgtgtgtgtgtgtgtgtgtgtgtgtgtgtgtgtgtgtgtgtgtgtgtttacaagcagagtgtatgtctctaaattcatctttgattctgtgtgcttaaatgtatctttcttagttgatggtaactttaaacaatacaataaaaggcccatattatcgataactacactaatggaaaattagcttaagttaaagagaggacactttctctatctttggtcagtacttcgggcacagagcagctggacaaaccccaccagaaacaaaggcttctaagttttcccaagcattaaccaccctcacatttttctatgtcatttgttttgtggtagcatttccttcacataatagcctggatttttatccaaaagtatgattctcaagggattctaatatgaattaataacaattttagggatattaaaaacaatatatgtgcttttatttccattgatgtggtttcattcttactgtttaattctacaaatatgtttctgttttagtattaatccctttcctttggtagatggaattttcttagttcctccttagtacgtgccttttatgatataattctatttgtattcttttataaactgtacatgctcatttaatttatagttaattattgtatatgacatctggagttactgagtaccaatgctatttcattaaaatgctaaaaatgcaaatgcagtgccttcatacctaacaagcaatagtattctgtggctacgatgaaacaccatgaccttataaaatgcttataaaaggaagcatataatggaggactggcttacaaaagtccccatacacttgcacagtctcaacactgttatttacaagttctgagattcaagacactctcttacctacaaccccctgtaaaagcaaaagcaaaaagaaaagcaggtacactcatcacacagtagcatagcatatacattaccattccaaaagggaggaaagtgaggagatgctgggccacaggcagcaggaccaactccaactctgtatctctacatctgatgcaaagctgtccctatctgatccaaagatggttgttttctgctctctctctctctctctctctctctctctctctctctctctctctctctctctcccctctttcccccaccccccagtctggttccacacctggtctgcagctctccttgtcaagttacccaatggttgtgacacttccagcatcttagagactccaaagcaacccaggcttcaccttcacagcttcacacaatggcctctctgagcctccactcagggactcccctgccacacacctggcctcaatggctttccttaaacatggtggaagattttacaactccttttccttatctttcttgattttaattccagaaccacatggacaaaactgctgagttcacctggtcccctccttgaattacactcacacatgctttcagttattgtttaggcctgtgaaacccctcagacattttcctttctcctgtcacagtattatctgggtggggtcttgccctgtggtacccactccctttattctaagtagcatcaggcttttcttcaaatgtgtcttttccttgagcacaatactgcatttcctggtactctttttattaaaccatacattccatagttctctttgtcctacttgctctgttttattgtctatgagcacaagggtgatcactaattaccacacaacacaatcaatacaaggttgtcttgaaacctctcccaaaactcttcaatttaggctcaagcagacattttaggacaatggcaaaaggagtcacattctttcccaaaattatcacaagaatgatctcttggtcagctactgatattctttccctctaaaccctcttgagttgagccaccacagtctacatcagcctcaacaccactggcttccatgcaggccctcatgcttgcagagcatacatttcaccaacttagccatctcctcannnnnnnnnnnnnnnnnnnnnnnnnnnnnnnnnnnnnnnnnnnnnnnnnnnnnnnnnnnnnnnnnnnnnnnnnnnnnnnnnnnnnnnnnnnnnnnnnnnnnnnnnnnnnnnnnnnnnnnnnnnnnnnnnnnnnnnnnnnnnnnnnnnnnnnnnnnnnnnnnnnnnnnnnnnnnnnnnnnnnnnnnnnnnnnnnnnnnnnnnnnnnnnnnnnnnnnnnnnnnnnnnnnnnnnnnnnnnnnnnnnnnnnnnnnnnnnnnnnnnnnnnnnnnnnnnnnnnnnnnnnnnnnnnnnnnnnnnnnnnnnnnnnnnnnnnnnnnnnnnnnnnnnnnnnnnnnnnnnnnnnnnnnnnnnnnnnnnnnnnnnnnnnnnnnnnnnnnnnnnnnnnnnnnnnnnnnnnnnnnnnnnnnnnnnnnnnnnnnnnnnnnnnnnnnnnnnnnnnnnnnnnnnnnnnnnnnnnnnnnnnnnnnnnnnnnntggagggggaggggacctgatcttgtattgggtgagggaaaggactgaagccctgagggccagcagaaagaatggaaacagcaacctcaggaggtaggaggttggggaaccctccagaatgcaccagagacctgagaggtgagagactctcaggactcaaagggagggaccttagatgaaatgcccaacagtagggacaggggaacttatagagccctcctccagcaggaagagaggtcaccaagttagggaggggattgccatcccacaaaactctgacccataattgttcctgtctgaaagatctgcagggttggaaatgtagaggagcttgaggaaaagaaggtccagtgacaggcccaaagtaggatccagctcaaggggaggtcccaaggcctgacactgttacctaggtagtggagagctcacaaaaagggacctagcatgactgccctccaaaagacccaacaatcagctgaaagagtcagatgcagatatttgcacccaaccaatggacagaagctgctgacccctgtggttaaattaggggaaagctggaagaagctgaggcggagggtgaccctatagaaggaccagcaatctcaattaacctgcactcccccaacccccccccccgagatctttcaaacactggaccaccaactaggcagcatacaccagctgatacgaggctcccaacacatatacagcagaggactactgatctgggttcagtcagagaagatgcacctaaccctcaagagactggaggccccagagagtttagaggtttggttgggtgggaagtagggacatcctcatggagacatggagtcaggaagaaagtatgggatgtggaacagtcagagggtggaccaggatggggctagggggagcgaaaaaatctggagtgtaaatgaatagaaaaaagaaagaaagaaagaaagaaagaaagaaagaaagaaagaaagaaagaaagaaagaaagagaagaaaaggaagggaaagggaagggaaaggggagggaaaggggagggaaaaaaggagaaaaaagggggagggaaaaagagagaagaaaaaagggagggaaaaggggggaggaaaaggggagggannnnnnnnnnnnnnnnnnnnnnnnnnnnnnnnnnnnnnnnnnnnnnnnnnnnnnnnnnnnnnnnnnnnnnnnnnnnnnnnnnnnnnnnnnnnnnnnnnnnnnnnnnnnnnnnnnnnnnnnnnnnnnnnnnnnnnnnnnnnnnnnnnnnnnnnnnnnnnnnnnnnnnnnnnnnnnnnnnnnnnnnnnnnnnnnnnnnnnnnnnnnnnnnnnnnnnnnnnnnnnnnnnnnnnnnnnnnnnnnnnnnnnnnnnnnnnnnnnnnnnnnnnnnnnnnnnnnnnnnnnnnnnnnnnnnnnnnnnnnnnnnnnnnnnnnnnnnnnnnnnnnnnnnnnnnnnnnnnnnnnnnnnnnnnnnnnnnnnnnnnnnnnnnnnnnnnnnnnnnnnnnnnnnnnnnnnnnnnnnnnnnnnnnnnnnnnnnnnnnnnnnnnnnnnnnnnnnnnnnnnnnnnnnnnnnnnnnnnnnnnnnnnnnnnnnnnnnnnnnnnnnnnnnnnnnnnnnnnnnnnnnnnnnnnnnnnnnnnnnnnnnnnnnnnnnnnnnnnnnnnnnnnnnnnnnnnnnnnnnnnnnnnnnnnnnnnnnnnnnnnnnnnnnnnnnnnnnnnnnnnnnnnnnnnnnnnnnnnnnnnnnnnnnnnnnnnnnnnnnnnnnnnnnnnnnnnnnnnnnnnnnnnnnnnnnnnnnnnnnnnnnnnnnnnnnnnnnnnnnnnnnnnnnnnnnnnnnnnnnnnnnnnnnnnnnnnnnnnnnnnnnnnnnnnnnnnnnnnnnnnnnnnnnnnnnnnnnnnnnnnnnnnnnnnnnnnnnnnnnnnnnnnnnnnnnnnnnnnnnnnnnnnnnnnnnnnnnnnnnnnnnnnnnnnnnnnnnnnnnnnnnnnnnnnnnnnnnnnnnnnnnnnnnnnnnnnnnnnnnnnnnnnnnnnnnnnnnnnnnnnnnnnnnnnnnnnnnnnnnnnnnnnnnnnnnnnnnnnnnnnnnnnnnnnnnnnnnnnnnnnnnnnnnnnnnnnnnnnnnnnnnnnnnnnnnnnnnnnnnnnnnnnnnnnnnnnnnnnnnnnnnnnnnnnnnnnnnnnnnnnnnnnnnnnnnnnnnnnnnnnnnnnnnnnnnnnnnnnnnnnnnnnnnnnnnnnnnnnnnnnnnnnnnnnnnnnnnnnnnnnnnnnnnnnnnnnnnnnnnnnnnnnnnnnnnnnnnnnnnnnnnnnnnnnnnnnnnnnnnnnnnnnnnnnnnnnnnnnnnnnnnnnnnnnnnnnnnnnnnnnnnnnnnnnnnnnnnnnnnnnnnnnnnnnnnnnnnnnnnnnnnnnnnnnnnnnnnnnnnnnnnnnnnnnnnnnnnnnnnnnnnnnnnnnnnnnnnnnnnnnnnnnnnnnnnnnnnnnnnnnnnnnnnnnnnnnnnnnnnnnnnnnnnnnnnnnnnnnnnnnnnnnnnnnnnnnnnnnnnnnnnnnnnnnnnnnnnnnnnnnnnnnnnnnnnnnnnnnnnnnnnnnnnnnnnnnnnnnnnnnnnnnnnnnnnnnnnnnnnnnnnnnnnnnnnnnnnnnnnnnnnnnnnnnnnnnnnnnnnnnnnnnnnnnnnnnnnnnnnnnnnnnnnnnnnnnnnnnnnnnnnnnnnnnnnnnnnnnnnnnnnnnnnnnnnnnnnnnnnnnnnnnnnnnnnnnnnnnnnnnnnnnnnnnnnnnnnnnnnnnnnnnnnnnnnnnnnnnnnnnnnnnnnnnnnnnnnnnnnnnnnnnnnnnnnnnnnnnnnnnnnnnnnnnnnnnnnnnnnnnnnnnnnnnnnnnnnnnnnnnnnnnnnnnnnnnnnnnnnnnnnnnnnnnnnnnnnnnnnnnnnnnnnnnnnnnnnnnnnnnnnnnnnnnnnnnnnnnnnnnnnnnnnnnnnnnnnnnnnnnnnnnnnnnnnnnnnnnnnnnnnnnnnnnnnnnnnnnnnnnnnnnnnnnnnnnnnnnnnnnnnnnnnnnnnnnnnnnnnnnnnnnnnnnnnnnnnnnnnnnnnnnnnnnnnnnnnnnnnnnnnnnnnnnnnnnnnnnnnnnnnnnnnnnnnnnnnnnnnnnnnnnnnnnnnnnnnnnnnnnnnnnnnnnnnnnnnnnnnnnnnnnnnnnnnnnnnnnnnnnnnnnnnnnnnnnnnnnnnnnnnnnnnnnnnnnnnnnnnnnnnnnnnnnnnnnnnnnnnnnnnnnnnnnnnnnnnnnnnnnnnnnnnnnnnnnnnnnnnnnnnnnnnnnnnnnnnnnnnnnnnnnnnnnnnnnnnnnnnnnnnnnnnnnnnnnnnnnnnnnnnnnnnnnnnnnnnnnnnnnnnnnnnnnnnnnnnnnnnnnnnnnnnnnnnnnnnnnnnnnnnnnnnnnnnnnnnnnnnnnnnnnnnnnnnnnnnnnnnnnnnnnnnnnnnnnnnnnnnnnnnnnnnnnnnnnnnnnnnnnnnnnnnnnnnnnnnnnnnnnnnnnnnnnnnnnnnnnnnnnnnnnnnnnnnnnnnnnnnnnnnnnnnnnnnnnnnnnnnnnnnnnnnnnnnnnnnnnnnnnnnnnnnnnnnnnnnnnnnnnnnnnnnnnnnnnnnnnnnnnnnnnnnnnnnnnnnnnnnnnnnnnnnnnnnnnnnnnnnnnnnnnnnnnnnnnnnnnnnnnnnnnnnnnnnnnnnnnnnnnnnnnnnnnnnnnnnnnnnnnnnnnnnnnnnnnnnnnnnnnnnnnnnnnnnnnnnnnnnnnnnnnnnnnnnnnnnnnnnnnnnnnnnnnnnnnnnnnnnnnnnnnnnnnnnnnnnnnnnnnnnnnnnnnnnnnnnnnnnnnnnnnnnnnnnnnnnnnnnnnnnnnnnnnnnnnnnnnnnnnnnnnnnnnnnnnnnnnnnnnnnnnnnnnnnnnnnnnnnnnnnnnnnnnnnnnnnnnnnnagagagagagagagagagagagagagagagagagagagaagaggaacagaatagcagaagaaagaataattcaaattacgatgcatcctgaatatatcattcatctagctttatgttttcaaatattaaacctcacttaatttttcaaaactagtatttctcaagtctaaatgtgtccatttatttcctttcagaagggaactctttagatatagatatagggttataaacatttcacttaaaaatacacacacactgagcagtacagtcaaaaacggatttgcaagcagcaatggatcattcttagtaagcagcaactcctgggaggagcacagatgtgtgagcagcttacagaattggatctatacggtagatgctcccaaagccaataaaccttatagcaggacaagaagtttttctctaatgaagtaactggagtagctggtgaccaaggaaaaggatttctgatgtgctgtaaagttagactgagaagatactggttgtactgtgtcacatcccaaaaatcagtgctgacagtgaccttttcttcaacccaactgccaaagactctcttgatgttaatccagagagggctgagcagttaaagctccaactgcccttccagatgaaggttcccagaacccatgtcaggaggtacccggccagctgtaactccagttccagaggatctgatgttctcttctgcgccctgagcatacaggccaatacatacacataagttaaaaagcaaacctttccaaaatctctttagtccttcacttgaatgggaagacttcactgttaatctttacttctttagctgtgaagagaagtgggcatttttccaacactcagccaagagctgtacctgacctcttttccccttggacagctcagaatcatttcattttgaagagttcgttcacaccgctggcacccagtgttctcacgggctttagtaaggactctcaccccccatccttttatctttgtctcatttaggaattacttagaacttgttgcaaaatctattgaagactgggtcacacaggaagaagcgaagtaccaggaagccaaaatggctgaggagctcaacaggatcaggattgagttggaactgaaagccactgtcaaaacttctgctagcaaaattcctggccccaaaagatctaaaagtaagtagccagtgcatttattcatagagtgataggcattctcctattttaatttcaaacccaaatagtccaagattaaaaggttgcccacaaatgcctgtgagtcttcactttctctaacaaatagaacagctgccttcgaaatgtgatgacattgtacctgagtcagacacaggaatatttgtcactgccccatctcctatgagctctgagagatttaatctgttatacagattagatacgaagagttagggaatgccaacatccctgatgatagaatctgtgggttccatcaaatatatttactggcagcgtgagaagtaaagacagagttagtgggtctcaagaggatagttgtagattccaaaagcaagactaaatcaagtcttcttcaagcagcaaataaataaacaaataccccctggaagtaggaatccaggaggaagtgggaaatgtttgccagaagtctgcggcatgtacttgaccagatcgtggataagtatacatctttgattttgttcatctctaggtcttgactagtttctagaactttgggcacataagggaagagaaaagagggtaacaaagagcaaggtcatttttaaggaaggcaataaagaaataaaatatagagttcatctagaaagtatagacatttcacagtccatagaaaagcatctctttctgctagcactaatacttatgatagctaaaggtgaaagtgacatcttatagtgagatcaagatatgaaacttctcaaaaatctgcagcctccttttgttactagaatagtttgtatatgtcctggctctaaagcaaaacataaaccactctaataaggaatcctttggtatccagagaaacggctatattatcagtagttgagcttcctcctatgggagcccaagtcttcactaaatgcttagagtaatgagagggacaatgtaagaaatgaaagaaaggtggtaagggaaatgctaaccactttttagatacaatgctactgagcaaaccaaaacctcaatatctaggatataaaccggttatttcagtggggggtgtacctggcaggtactgaaccaagtctattcctgtcagaaaagatatcataatgtttaaaagacagaaagacagcaatggcaagagaggggtctcgatatgggatggggcattaggtgagttcctgtgattctggggtactaagattagctgaaaatttcagggagatagattcaaacaacatgtcaacacagtgtgaatgtgttgtgagatgccatcaccaaaggctcagcactactcaggtatagctgtggagatgcaagggagtgtttaggaattttaacaaggagctgaacctgagcgcctttgaggttgcctctagcccagaggcttagtcctcctgtgattgctaaaaagtttgatttccttcacttatagctaacaaagtatccagcaaaacagagctatcagaccaagaaaaagataaagaaaaggaaaaagacaagatccccttcgtattagaaggctctctcaaggtaatccaagacaaatgtcacagatcaatcacaaggccaaaattaccttgtgactgagagtgtgttctagtcacgggacatgatcattttagctaaaacctcagagttgactgaagcctcagtgaaaaaccctgtgtcttcacagctttgccacatgacaagtcttgggggaggggggaaattaatatcttattatttttgcataaccacaccccagggcagtgagtgattgactcatggtcctttactctttacctttgttgaaaatgcttgatttttttcacatatttttatttgaacttcaagttataaaagtagtaagtgcttctgtgaccattcaagattcttttcctgcactatccctgcagttcctgggataagaagtgtcaaagtttgataggttccaattcacacaaacacacacgcacaaatgtacagaggtgttctgttttttcatgttcatgggtctgtccttgtgtgtcaccctcctagaatgtggattcattcaatgatgctgaaccttccatactgtgtggtttagaaacttttatggatttttcattatccaagtacaatcaattattaaatccatctgcagctcctctctcatccttgaaggctgtggagaggggaaggggaaggctgaaggttcccagcttctaacctgggtttgatctttctggtaagcagcgtctaccccattctgaaaccatctaagggtttgccaagagttgcctcattagaacaaaagacagtcctatcactcatggaattccaggggatttgagagctcagtgccaggacccaggaatgaagaccaaatatctggttcttattatatcataatattacagtttctattaaagtcagttgttacttatctgaaaatggctttattttgcccttattcattaagcatagttttatatttatacaattttagttgagtttctcatttcctcacacgactctcaagacatcaatctccctcttctctgctaacatcagagatgttaataaattgtcacattttacatgatttgtagacagtttatcttttctctttagctgctttgaaaacattctgtgatcatctggtaagcatttagcagttgctctctagaaaattgaaaggtgcacataggtacacaaaggtttcagaaaatgtatggatggtaaacttagtatgtaatctgtaaatgataacaaatcttatagtactcttcattgcaaagtccacttagcaaataatacttccatatgctttcactgatttttggtatgttattgtgtcctttggttacagttgacaaacaagtataatcccaccactagtattaataatttgatcaatattttcttttatgttaatgaggcaaaagcaaaattacaaaggggtgtatcccatctatttatcaataatgagcaatttggctgagtcaagaaggagaccctgaatgctgaaaggagagtttctcatctttacgtacagtgtagtggagtagttacatgcccttgagctgaatcgttatttctaacaatctgtcctttgtttttgttgttgttgttttctttgttgttgttgttgttttttagcacagttaatcagtggtcaatctcctagatgtagcactggctaatgtttgttgtgtaaatattccaacaaaaggtgatttcaagctgccagtgtggcactgaaaaaccagagttgggaacagcatggctgtgtgtaccattgtatagtatgtttctcatatacagcacagataataatgaaatctaatacaataagtgtaaatgggtacattttgatcatgtgttggctttgttttaaacattgtacttagttacatttacatgtcttttttgattgtggctttacttagcaactatcacataaaattccctccagccccaaattatcagtaatctctttaaatcaatatgagccaggtttgccacacggctgttactttatgcttagatttattgacctttctgaacattgggatcaatgcctatcatcaccattagcaatgactcagccaatatctgtccaaatacttccttttcagaagtcatagtgtaattctgagaggaaccgtcaagctcctcatttttatacctgtcatttttatagcccttacctatacttgtgatagtttattctctgtattcaagcaaccagaaacttgttttatgactcttacttcataagtcccttatctgcaatcccccatttatactttcaaagtcttggtttagatttttattcaaagtggcttagttccccatgttttgtgatttttgtttgtgagctaacatcaattcagagcttcttctatttgagactatatatccccactgtcttagctcccctccctcagccttccaagtgataaactgcaaggatgtatcagcatgcttggaaactcatgatgtaaaaaaaaatattctgtcaccctttttgaaatattctgtactgggaatgcttctctgggtagtctacctttttgccaaccaagcatattcaggatgtaaattgagaatggaaggaaaggagacaggccacactgctactgtgggccaggtcaaagacaacaaagtctgaaccatgtaaataacatggtaaaaagttggggaagaagctaaaatgaagcgagttcttcaaggaaccccacaggggtgacaaagaactgaggagtgagaaggggacaatgacagagaaccacaagtttcttggcccaatgtttcaaaataccagagacaacacataggaacaccatactaaatttcctcccaaattaacccaaatgtaattcacatttgatctttctcaaaatccctgctaagctgtttgatgtatccccaggcatggaaggaagaacaagagaggttggctgaggaggaacgcctgaaggaggaaaagaaagcagagaagaagggaaaggatacagggaaaaagaaaggcaaggataaggccgacaaagacgatgctaaggctttgaagaaaaagtcttcttccaaggagaagcccaaagaagagccagcaaagacgctggaagtgatagaggaaaccgccccacttccggtaccggaagtcgtttatccggtaagccaactttggaaattctttggattacttctaacacttttagggaaacaagtgttgtttgtttgtttgtttgtttgtttgttttcctgctatctacaaactagatttgaatttctctttctgtctagactcttcttcatagctaaacacccaaatgggaaaacccacaggcctgtttttctgatcatgaaattagactatcaagagctacaaagatggaagtgtgaccgaaagacttacgctttgatattaaaacatgcaaataagcagctgcacaggtcagctcagggagcttgacttgctctatgtacttagacgcctctggtttcgtgctttgactgagccctctctttgctatttctccctcaggtgtctacgtattagaaaaaacagtgaggaaaaaaatggagagaaatgttctgttctattctttgtagctatgactccacccttgttactgtagggttttaagaggaacttgaatccccagcagctataataacaatatctgatgtttaaaaatgtccttgacatacaaccttgtaacacatcaaatgtcaatatttcacttcacttttcaaagaaaattagcaaacgttgtctttcctcatgttatattgatgacagagcatgatttttatctagactggattataagtgctcataaatagtggcatatacctgtaatcacagcctcctagacactgaagcggatgatcatgagtttaagatcagtctcagctactgaataaaaccctgtctttaataatcatgaaaattaataatagcattggatttgggtttctgagcctacaaggtagcaagcaacaacaaaaaaattaagcttatgaaaactgtagttggctaactctagtaagctgattgttgtcaattgcagttccaccccctagtgataatgtgttttcttctagttccgaggatacaatatgggagacatacctatccaaatctcaggaacaaattactatctgtatccttctgatggtgggcagattgaagtggaaaagaccaggtttgaacgaggtacattagcaagagctgttaatgtcatggggagggggaatgttaatgcatttccaatatcatggggcattgtgcctctgagtgtggagggtggcaactaactgcacccacattcacaccacatcgcattctcaggatcaagtgcttctatcgttattgagtctgcaagggatcaaccaactcagaatttactcagacattggtgataggagcatcctaattgttgaaaatatttaaatgcttctacattatcagtcaatggcatattagcaactgtaataagcaaatagttaatcaagttctactgattacaacacaccatcatgtcagaaagcaaacatatgctttgagtttatagtgtggttctggctcatgctccacagtacagtgctcagggacctctgctgctggtatgctagctcttaccaagacttgcatatgtgaacagtttatataaagttcagatggttcatagaaaatacagtattttcatcttaatcctatcaattttgagagacactaccaccatagttgaaaatgaaaggctggatttaaaagggagataaaagagaggtgggggagtctgaacactgttaagagagaatggattagtagaaaagtgcttacaacctgcatagtgatagtaatagtaattgtggaaggcacacacacatgcattaaatatatataattatgactgtcattatagtgccatagtcgtcaagtatagtaatacacatttgaaatatcaacatacatgaggctaaggcagaagaatcataaatttgagggtgttctgatatacacacacatacacacataattatatgcattatatattattgtatataaatactgttaaaactttgcatgttaattagctcatttgatatatcggagttgaatgtatgtgttcaccctttcagaccatgtattttgtctctgtgatttggtttgggatgtgacaagaaggcctgcaaaccctccttgtccatgcttccttttggcatccctgtatagagttggtacggcagctgctgtctaattctgttctgcattccactagcattttgtcaaggtgtgtgtgtggcatcttcagtcagcccactttctatcctttgattcttcctcagggtcaactttcatcaaagtcaaagtaaaaaaagataaacacaattttataattcacctgaaagacccaaaggaaattgtaaaaaggaaaaggaagagaagaactcagaagaggaggaggaggaggaannnnnnnnnnnnnnnnnnnnnnnnnnnnnnnnnnnnnnnnnnnnnnnnnnnnnnnnnnnnnnnnnnnnnnnnnnnnnnnnnnnnnnggggaagaggaaaaggttaaacagaaagtggaaatgagtgagtgtctttgcctttgtggtgctgggctctggtaagtaagcagtgatgtgggtcagcccagctctggacagaactgcacacgcatcctttgtactcaacccgtgtggattttacaggtgcggcctggagcagttgctctctacttgtgttcatctttcccaacacactgagcatggatgctgcatgcctggtgcccctgcaggtggctgttaactgaatcttgctgccaccctacagaatctcttgttttcatagccatagcaagaggccaggccagtcagactgatgtgacaacccagtgcacactgtccactctgacattcatggtttatgcagactcgaactcaggcccttttgaattgatccctaccaagacttgcaagttccttaagtgtaagcaatggggtttccttcaagtgttcctcacttagtttgtttcattgtaccaatctctgagcttcaaagatgaggttttaaaaaatcacagatttagtcgtgagtgtattacttaagtagaaacaagaagtgcaatggctgcccacttgcacttcgaggcaacaccccctggagaaactgtttcttatccaagctcatagccatacaagagaacaagttaatttttaagatgttttcaaatccagttagttatgggatcactaagtcttgcctatatgtttagttatactgatactttctatagccaagaacacaatgcttgacaatttgaatgtacctaggaaggaagcatagaaaaatgttacttttaattaattttctttgttcagctaataaaaaagtattaattggggctgaggaaaaagcttagttggtaaagtatttgctgtaatcatgaggactcaagctcaggactctagcacccacataaaaggccaagtgcttgtgtacacagctggaatccagccctgggcagtggacatgacaggatcctatcgctcactgacaagcagtctaacctaagcagtgagagacacagtctcaaaagtcagagcagagagcaatagaagacaacacctaagatctacctctggcctccacagatgcatgtctgtgtgtgtgtgtgtgtgtgtgtgtgtgtgtgtgtgtgtgtgtgtgtgtgtgtgtgtgtttgcatgcctgtatgtgtgcatctcactagggactgaacctagggtcttaagtatgctagaaaatactctaaaactgagtaatgttcctctgttctcagcccatttcatttcttcttctcactacatagtatgtggttatctgggtaggttggcttatctattctccaactgaaggacatcttgcttgtctccaagtttggctaaataaggatggttagtgcatagttttttgtgtgggcatacatttttaagtactatgagtaagtagcaaggagcatggttgctgggtcatacggtacagtggagcaatgcccataaggaggcagcaaactgcctttcagcgatgaatgagagttttgctgctcccgtgctcctagccttctgtgtcctccatgcttcgggttttctccattctgacaggtgcctcttttcactcattgttttcatctgcatttccctggtgacgtataacatcaaactgcttctcataggcttatttttgatctgtgtatcttctttggttaggttctgtagaggggctttgagctgtttctcctttggcttgctttcttattactggtcattaggagtcttcctatgtttcctgtaacagctctttgtcagagtgtcttaagcaaacattgactctcagattgtgaattgttttctttctcatgaagcattgttctttttatttgatgtcccattgagcattcaaatattcccagtcaggaaataatctgctcataggttagagtattttaggctgacaccgtcccatttttattatatgatgatggaatgggtaataaaagggaagtgagagagcaggatggaccacttgagaccctccacacgtgacccataaatgtgcgtttttaacacattttctttttaaaacctatgctttagtcaaaccattttcaattgtgtttgaaaatataaggcattataaatgtagggatttaataaagtgtttttaaatgtgaagaaacttggaatgacttggtgattttcatttgaaaagtaatgtgaatggtccacagatcgataaccagcatatggccaagccattcactggtttatatcctctctgcattttgacctaaagtcctttaaacgagaatctcatgttccatccctgaaactctgcctcacttccctgtgtccttggtcaaagccaagtcaattacttttaaatcgatggtattagaacagcttagatgcccgcccccagcattcccactgaattctgcttacacttctggagaaaatggaaatatccatgatatgattttatcttttagaaagagcacagatagagaaggaagctgtcagcaagtttggatctttttctgccaccttggaaaatggaatctgcctctcgataagttactatggatcaaatggaatggcaccaggtaagaaacacacaacagaataaatgtcccatgatgggcagtccttgcccttccccagcttgtacatttatcagaaataaacctcttctgatttaatgcttcacatatagtttttcctgcaacatagagatatgtggggtatggggtatatgtatgtgtgtctgtgtttatctgtgtctgtgtgtatgtatatgtgtgtaggtatatacatgaagataattttcctttacatcaagagcaatgccttcactttcaaatttcttttatcaattgtgtaatcttttacataatcacatgtacacacatatgtatattttgattattaattagtccatgaaagtaattctgttacattggtacaaggaaagcatgatcttccagagagttctcatgggtttctacagaacaatatttttatgagtcctatgatagtagaactactcagtgtacttcaggatgttggtttaaaaggagccattcattggacatattagaggatttctgggctccactttcaagaaacaaattccccaactggaagctatttcctttcaaaccacaaaatactatgttgctttaccaagaaccaattaagaaatatgtggatccccacaaactttaaagggatccaaccacagtagacattttttaaacattgcaaaatcaatagataatccctatgccatatagttttaaaactgtgtgctagcagagattatggtgatcatcttacctcctgactatgtagctcctttgctgcagaccaccatgaattctcataacattgtttcttaaaagttgaaatatctctagaaccacaccaagaggtgtctaaaagcagaaatacagatctggaactgagaagggaaaatcatgcctactgtggccattgtagagtcaacacatagataatatttgaacccctaattgcgaataagatcgttacatctaatatatgcacagaccaaactatatataacgatcacatacggtgttgcatacatgtgcctatctggacttctgcccctgtaaaacagattcagtaagtcagggagacttgggcatctgtttaattccctgagtaattattatggtagccaaacttgagaacatagtgtaacctgagacctggaagcatcttcaagacttaaaatggagaagggggggggtgaccagaaaggtcaggagaggtcaaagaagaggtataatggatcctgcaggagaacagatgacaagataaaaggggcacatgcttgcacatgcacacgcatgcacgcgcacagtgttgcctgtcatcagccctttagaatttccaaacttttaaaacccaaaagtcaatagatagcctacaagaaagctacttatctcaccttagataaaactagtgtttgtcttcactggatctctttatctatattgcttgtgtctaaggtatcctcatgatccactctctcagtgcccgacttgctgttatgaatctaggaccttccagatgtttaatgagttccattgctcaaattaaaagaaaaagggaaagttagtagagcgtacaacagactggagggaaaggatatgtgagacaaggaacgtgagattaattattgtatcaaccacactaaaaggttaaacactttaaattttttaactacaatctgattttcaaaacaactacattatctctggaatatatccaactggaaaaacatgtttcacatagtgggagttaatgccaacttgaacaaattttttgagatgtatcgattaacaagcatatgaaatatgaatatttaattttccattctccccttttttcctatttctagaggttataaattctgagttggaagcaatgatgaatattccttcagctatgacagcaacagtggttcctgctgtagtgactgttccccaaggcaaagggaaagctaagccgaaaggcaaagaaaaacacaaagattccattaaagaagaggaacttccaaaagaagaagagaagaaggtaggtgaacatggctacaggtttccaatcttttcaccccaatgttacttttatgattaaaatgcaattacactgtttctcccactccctttcctttctctaccttctccaaaatctcttctcaacatctctctctctctcaaattcctggtctactcttcttcattattgtcacacaggcacaccagatcacacacacacatacacatcacatcacacacacatcaacacacaccacacacacatatctcacacatcacacacacacacacatcaacacacgtaacacacacaagtttcacacacacacacaccagtagggttgctggtttccccaacattgccttaatctcttttaactactatcacaaaatatcttaaagtacatgaatcacaaacaacaaaagtcaattggtcaaattgagactggtaagtccaagagtgggttctgggtaactctatgtctcatgtgagcaagttgctgtagacagcaccttctgtgttcctttatatcacagaaagagtaaactctgttcactaggtacctttttataaaggcctgaatcacagtcatgaaaaccaagccctcagaattctcagttccctaacggcctacttgataccatcatgttgggtatcaagttccaccatctgagtctggggtggggaaaccaacacctgaaccatagtgttgtccacatcccatacatccaaataggggcaccattcacattccactccagtccatttgctcaacagatgcattcacagtgacctctgttaactttggtgtcttcttctctcagggaaaatgtgatgtttgatactgtgtcttgtcacatgtcaaaattctggaatccttttagaatccattgcagagtctacctacttactcacaagttatattgtttgacaaatccttgcttgatcgaaataaatgtgtcgccttcagagaatgacaagcatttacttatatacagaatcacatacaggaagaagtagaaccagagatcgttatacaggaatcaccaccctatgtacccaccttccaaaacttaaatgtatcttgccccagtgggctcctgctgaccttcattgggcaagaatctacaggtgagtgttaactggagtggacaaggaatcatgggtcaaaaactaacacagaaaaccccaccattgaaagtgtgtcttggccctggcattcccctgtactgggacatggggaatgctagggccaagaagcaggagtgggtgggtaggggagcagggtggagggagggtatagggaactttcaggatagcatttgaaatgtatatgaagaaaatatctaataaaaaaaagaaagaaagtgtatcttgtcaggcggtggtgacgcacacctttaatcccagcacttgggaggcagaggcaggcagatttctgagtttgaggccagcctggtctacaaagtgagttccaggacagccagagctacacagagaaaccccgtctcaaaaaaaaaacaaaacaaaacaaaaaaagaaagtgtgtcttttcttaccaggtgtacttattgatgatgagcaatgggtaattttcaagtaatgatcagaacactaatgaccattctcaagcacttgctgtgatgaaccattgtcaacgtcctgtacatgcatgtaaaaacacaaatcttacaagagtaggtactgataattccatcttataaaatacagactctgagatttctggaggtgcaacaatgtgcgcaaggtcacctgactggtaaaaggcagagttaggaagccattcttgacaaatggtattgcatcaacttaaaaaagccatcccatagtactttgctatttagaaggtatttattgagtgcttttgctcttgattgccagtgagcagcagaatactgagagatgtctggctatggtgaaagatgggggtttgggttaattttgaaggatgatgggtaagttagagaaggtttgaatgtgaggctccctgaagttcaaagaaagcaggggataccagagcaatgtctaccatggagcaagagcttactcagaatggcatgccaagagagaaaatggagtccctaagacactgaaattctgctcccaaatcatttggccttgacatgctctggactttagtgtatgcaaatgctctaagaaggattttactatttgttatgttgtgaaaatgtccttactcactacgtttgaatgaaaaaggtcatcaaagacgcagtgtgctgagccatctgtcatgaatgaaaggaaacttccctagttctcaaacacagacaaaagaataaaaacaaaacaaaacaaacaaataaaaaagaagataaaaatcccagccctgtagcaccattcaccccaccaatagctttcctctcttttgatttttaagattattccatcgtagatgaagaacccacccggaacctcatgattcgccagagctacccccagcggttgaagcactatgagttctataaagcagtgatgccacccctggagcaggaggcatcaagagttgtcaccagccagggcaccgttatcaagtatatgctggatggatccacacaggttaaagactatagtatttaaatagcctccctcacagtgaagtgcaagacagctggactttaagtaaggagcaaggctactgcacggaggagacatacacaaagcacaagggtgcattaaagtggcaagtgaaaaggagtgcagttggaggcactgcagtgaagttaggctgtccctgaaagccagagtgcatacaatagagatggtgttccttctatatgatctataagactgcagactccatatgctttcctctttttccctcaactcatcttaaagcaggaggatggaaagctcttaaatactcaattcccaacagtgctaggagacaacgaaatacatcattagtgtaagaagtgtttaaaaaattgctagaagatgcaaggtggttagggtcagactgatagagatataaggacaaagtttaaaatatgtacaattgaaaaaaactctaaaattaaggaggattttgaatagaaaggtgtacgtctaagagctgaaaatcagggtagttctgcaggtaaactcattttgtagagacttaaaaatcagaagctatgaaacccagaaactgcatgcctttgcccaccttcaaaaatgatcagagagaaaggcttctataattagacaatatactaccaagagccatgagggtttcaagactatgtatctaagaaaatcaacaacagattcaatattgttaaaaatcacctaacagtaaatacttgaacatacattttaaatgggtaaaactgatatagacagagactcaagttaacaataattttaaggaaaatttaacttccgtgacaacagcaagatagctcagtgggtcaaggcgcttacctgattatcaagcctgattactgagtttgatctccaaaattcaaatggtggaaggagggaagagactctggagagttgacatctgatcttcatatctgtcatgatgtgcacacatacatacatgcctgaatatatgtgtacatacatacatacatacatacatacacacatacatatagaaaagctgatgtctgatcttcatatatctgccatgatacacacaaatgcgtgtaccgcgagtgcacatacacagagagagagagagagagagaggagagagagaaatggatggatagatagatagatagatagatagatagaatgaaatttaaaataagtataaactgctgtgaaaaaaaatcaaaagttcttcaaattttaaagtaattgtgaaaagccaagtggtaggaggggtgacgtagagagaaaagagctaagaggtgtggaaatgctccatatgccctagcatttctggaagaaaacaatgagaatgggaggagaatgtagtttagacaatagtgtgtgaaacatatttcagattcatcctggccaagtgccaatctgggatgatgctaatttatctttaagtgtcatcttgctacctaggactgcacaggtagcctgcaaagcttctgaagagcccaggaagaatcaggtcagagtcacagggacagctgacttccttaccatactccctgggaggctgtgcacatgggtacccatggagtatctatgatacctagagatggcatgcgtccttggtagatggtaatggaaatgagacatttaaaatataatacatttgaaaatgtggctgttgtagaattcttatctatacgattttccaattatatagaataaggataaagaatagaaaagtatattaatccaacaatggttgtgaaatagaagcaagacagatataggtagaaaatatgaattcatagttattgctgtatgcaggtgcaaatcaaccctctaatggcactttctggcacccacatgaaggtctgccttcagccgtcctgcagattattttgagccccaaacatgcagggtacagcactctttgaggaccagcctcctcttgacttctgagaattctgagaccttgtttttccttcagattctctttgcagatggtgctgtgagcagcagccctgattcgggtcctgtttacacatctcctgaattgcctacaagcccccataatggagatttggtggacagtgcctctcagcccaaatcagaaacaggacctgagatcatcattactaagaaaggtaaccatctaagtatcttactctgcaggatttacagttttcaaatgcttcacagctgttccctgttatgatgctgtgcatcgttttattatatacatacctattcatgtacaaatacacactcatatgtatatgctaattttctttaccaacacgggattgcttactagctcatgaactgccttcttccactttgtggaataaataacacacattttcccatgcataatgaacagtttcctatgtcattgtacccacttacacattagctatactatctggggttgtgttttaggggtttgttaactaagtaataaaagattcgagtcagcatccctgggaagctgttgaccttctcttcaagttgagacaggacccctcggatgcacccaggggcttccatttatcagcttccaaaccagaaaagaaaaagaagtgcattcaagagtgtgtgttctcaggagattcctgaccccaaccctaaccttcctccctttggatctcaagggctacacctgcatgggtttcagtgctgccaaaacaaagagccgatattttgtgccttttttcatctgatttgtggagtgtaaggggtgttcaggagcagacagtggcatctgcaataattgaaagcaaagattgctgctctgaagatttctgtttatactcctcccactagcacaatatacgaaaggatactttcacacactcatgacaataccaaatattattctctaagtgtcaatcagtttggttagtgaaccttgttactatttgactaatagtgagattaataagttgagtggtaattgagtttagttcatagtagctttcacaggaataattatattttagttttaatactatctcttccactgtaattctgaaattttttgaattgttttaatctccttctacattctacattctacattcattttcaagtctctataatgttcctagtttattttaatcactgattcttaactgttgaaatacaatttttaatcttatgcatgatcaataattcaaacctatgcttgaaaacagcacacatcccgtagttattcggtacagtgttctctttatacttattatatgaaacttgttagttgtgtttcccagatgtgcctgaggtcagcatccttttctgtaaagggcaagatggtaaatcttatagccttggcaggccatgtgttctctgtccctgtaactcagcaattctgctggagcaggagagtgctttttggtaattcataattcaataagcctcaaatatgctgtgtcccaataaaaactatttatgaacattaaaattggaatttgatactgttttcatgcatcataaactacttttaaattcctattagctgcttagaaatacgaggtgtcgttacttcacagacaacacagaacaggctgcaagccttccttatagatagaacgcccagtccttacctcccatccttgcatgcttcttgtccccgacctgatttattcagccacatgtaagttgaccaacaggtgagcagtgctgctcagcactgtgctccttgtactcctccttgcttcttgtgtaagataaatttgtttctttaatggttctgtcaaattttccttcagatagtttgatagtataattgtaaatacagctttagagttattctttgtggtgagtttaccttgtcattgttttacagggttttttttttttttttaattgtgagacttctctcccctaatgtttctttgcttagattgctgtgtctctcctaaccacggttctaagtaacctcgcgggtatgacttttccactctcatagtcctctgtagcatgtgcctaaatgtgtctcttatatacagcgtataggtagatgtcgtcaaagctaagtttgaaaggtcttgtttatagagattttaattcattcatcgaacagttgacatttcctgaaaatctccttatattgtgcttattctcaaatggcaatttcactgagtgtgaaattctaaattgatgcacactgacagtgttttagatatactcatgttttaaagatagctgttagtccaattcctgctactttaaatatcattcatcctcagatcattccccatttttttaaaatagtttcaatacaattacacttggtttacttatacaaatagtagtgcattaggcactttaatctgtagataagtgtatctcactgatgctgaaaatgtctcaataattatctcttcaaatatttccattaatttccttttcctctatttttgtaattctcataaaacagaagcctttgacttcttccctttttactgaggattgcaacattcagtttcagtctaaataattgactcaagtctatctttgagctctcctctaacgtacattatatcttctataaaacctcatattaatttgtttaaatttcagatgttacgtttttccacatctacttcccttatgttcaatctgtcttctctgtttttttattaaatttttaaaattaaaatataattacatcacttccccttctgattcctttcaaccccttcttcccctacatccctctcaaattgatggtgtctagtcctttgattattgttgatatattatatgtaagtgcataaatatgtacatacaccttgatccatttaatatggctaacatatgtatatgatatgtagatgattgcaggactgaccggttgttattgaacagccagtgagagtcctcagcctcggaggagaccgttttccctcacacagcagtcagttgttttctgtagttctttatctaggggtagggacccacagttcccagttattctttctattgctagtatcattgttcagctcccgttcagacagccatacagataaggtatcataagtgtgatatttgtcttttctaggagacagaatccagacttagcagacgtctctgttttctgtctcttataggcttgctatctcctcctctacaatgtgttctgtgccgtaagtgcatgagttgtgttgtcagatgtatacactggggctagactccccacaacctaataatcactgtgttatgacctgttgtagttttctgtaatggtctctctgctataaagagaagcttctttggcatcgggtgagagccacacttactgtgggtaaacaataagctttagaacggaattaggaattatgttggtctagtaaagtagtggtagtagggtcttttctaagattcatgacttcactagtccctgataactggctatgtttctagtattaagcatgattctcctcctattgagtgagacttaagttcaatgtcacagccattggttaccatcaggatgtgagtgacactattgtacctttaggtattgctagttacgttggtcgttgttgtagttcatgggcattgcagataggcaggactactgactgcttccctccctgggcagcttctgtaataatttttggtaatatgaaaactagatcacagaaaggaagcttctgagttatatccagctcaaaccttccaagtcctgtatgggaagtgtacagtggcttcagaaataggtgggaccttacctgcataaaatgtataggaaagtggatggagctagaagatactgagtaaggtaacccagacacagaaaagccagaggagaggaggagaactagagaggacatagcaggatacagcggatgtaaagaggaaaatgagaaaaacagggaggaggacccattggtgagtggacaaggaggtcaacacagaggaaagaggagggagaatgcacaataatatcaagcaaggatgtcgtattattttatagttaccgcaaatcatatgattttttaataaaattatgccacttgggatgacagtgctccccacaagagcaatgtgttatctaacaaatcccccagggccaagcatgagaatcctccattggagttcttggtcaggattgtccaagtaacttccaaataatgcaggctatttctgtagccccctgctgtttctcagaggttggaggtaacctgcctcctctccactcacacttaaaactggctccttcacaccaggaatctcacccttcagactctgcacctattcagttggtgcctctgactcccccttggaagtgcttgtgccttgttgctttttgattattgcatgatcatttttatttcttgttgctttaactctaaatgctttggatcaatgcaaatatagatacatttctttgaaaacagtttgtttcaggaagaaaaatatcatggatctgatattaaccctattattaaattattattctgagggggtttcggaatgtcacctaagcaatggtcattctcacgtgaagactcacatgcttgctacttgtgatcacataccacagatatttttgcttcctctgctcagccccagattgaacactgacctcttgtcccgtagtgctggggtatatggcagcagaaagcatgcatttattttgtgattagttcacactttctgagaacagttcttcacagtctcaagcttctgggggtgtctcatatttaactccttgaaccatcgtgagtgagttctgaattttgttctttccttagtcccatgccaccccagtttgagaaggccacttcacagggccaagctgtgttcaattcaagcttgacttccttgtgtccctgcctctacttgggccttggctagtgctgactacatccttcacttattacgtcagagacacttccaaataacaaaactgtactggcatttttttgttattttctgtggaattcttgatgacgagttggtgatgttgctggaatggaacatgaactgtacctaatgcttatgtctgatcactgccgtcttcatcactttatctatctgtgcccataataaaggacgagagtagttacataagagttcagagcatgcacatgatcctctcagtgcgctcttccacctctcgtcctttcacacttatatactcccatgtccattggcactaatatcatacttatctgttctactgctgcctgcaatctctgctacactaatactttctaactgttgctcatgctttctttatgactaatttcctatattcctgccaaaagcacccaactcatcttttgagaacttcactgtccctcttaaatatttcctgtaggagatcttaagatctataacaggccataaagatacattttactggacccgtgcctccctttccagtttctcctctcaataaaaatgtatcctctgactaaaaaagtacgcattggtgtctgcacacaccatgctgtgcaccaccaccaccaccacccacatatcccctgccctgattctgttatctttctaggatcctcatgttggcatgacttttccacttctggtgatgagaaaacaagagagaatgagacaggggaagagaggaaagaaaagaagagaaaaaaagacaccacaccaaatatttactccctcctgtgggggatctatacacattgtgcatctggcaccatgctcctctctgacgctcatctggtagtgctaacaagtcacaaacaaatcctgaggcaactggaggcgagaattcactgcaagtctcttcttcagttctgcccagtttttgagtccctgtgcattggactgagatctgtagtctgacatatgagcattttgtgctctgaatctagaaactcttaacaatcctttactttctgctcataattggtttctgagtttacctcatcagcgaggcctggtgacacatgtgtcccccagatgctgagaaggatggaagaggaatacgcatctgatggatgttgatgtggtgttcagctgtacaaagtcacttctgctgatgagaagccaaggatttgcttggctagttagggccctcggattcagaatgaactaaatagaggagattaaatgtttcaaaggctgtagtggatagatttcatatgccagagaagagtgacatacccagaagtggaatatagcccacacgagatctgggattcacagacaaataaggaagattaaaactgttcagaaaaaaacacaatggcttccattcaccaaacagtgagctgcacataggtgtgtatgcctggaagaaggtaatggcaattcagctaaggttcagtccccaaactgacctatttacctatttacccgactttccctgttaagaagtaatataattggtgactattgctttcgcgtgtctacgtgtctaaagaggttcctactgtgttaggacttaatgagcagtctgtgaaagtgttctagttacactgcaatggctaattgtccttgatcatccacagggaaaggtcacaaaaatcaaacagtggcaaataagagtgaaacccatgatattatcccagaggtacctccaccaactcccgtagagtcccacattggcacctggtttaccacaacacctgatggaaggaggattggcaccaaaggactagagaaaattgaggacttgaaaccatatttgttcttccaggctacagatcccatcaatggaacggtatgacaaagtggtgcatatcacaaaaatacctaaaccattagagtcccgaaacacatagaagaatatgtacaaatctcaacttccaaatatttgttaggcagtaggtgggtgggttggtgggaaggtaggtaggtaggtaagtaggtaagtgggtgtgtgggtaggtggatggatggatggatggatggatggacccacctaaaatcactgtgtggtttagtagcaagcatactgttttctgaagagtgtgtgtgtgtgtgtgtgtgtgtgtgtgtgtgtgtgtgcgtgtgtgtgtgtgtattttgtatgtgtgtacatgaaatcatgttagaataaactatgaatttttgaagtgagggttatgaatttttgttctttttctttcatttatttaagtgattaatttgttgttgctggtggtgatggtggtggtggtggtggtggtggtggtggtggtggtggtggtggtggtatcgttgagacagtcttgctgcatagcccaagctggcttgaactcctgcattagcctctgtagtacactgcaatgctgaatagctcgtgaattgtttatactacctaagcatagctgtgactaatgtcacctatctccttgtgttaaatatatctgtatatctgttttatctctgggaatgagaggctatatgttcttgtcctgcttctttgtggccctctgtactgagtggtcaaaactggttcaggatctatgctttcaaaaaatcacactcacattaaataacttaaaaactcaacatcagtgagcacaggggattttatttgaccacaatagggagtggtaaacaactgttattttaaaagtagtggtttggtttatgacatgaaatcactcccctgccatgagccatgcaccttgcacatgccaggcttcctctggggtgttttgtctactttagtcctcatagaactatagattatttattacatgatgacaaaacagagcccagcaagttgaccactcaataactcactcgaaggaagtgtttggcgccaggatttccaatctactcttagtgactgagagctgcgctccttctaacatttagttatccccctccccaacagtgtgtgtggaactctgtggcaccccctaaacccaaacaaaatgaagtattttctaggtgcctcgtctctgctttacaaacacactgctggtaacaaatgtctgccttctcttagcagattccatgatctaacctacacatcctctccccacttcatcagctatttgcagaataacttcacaatctttgaccttgctatttgtct

SEQ ID NO: 809 - DNA, 3625 bp, Mus musculus
cagagacgctcaggcctggcctcagcccagttttgaggccaatgaacctcccatccttcgcatggcacccaagaaggagaaacctaccgggagcgcaaactataagatatgggaaccttccctcatagctgcacacttgaaccagaatgattggaaggcctccatcgccttcgtggttgggaaccgagttgaggatgatcttctcattcatgcccttgacctggctgttcgactccctcagcggaaactcttcagtattgtgtcatgggaagacattctgcagcagatggatgaaatacagtcacttgctgaaagtgcttcagctaaaaaggggaaaaagcccacatctgtcaatttaccgttacattacgaggtgttcctggcagcaaagataatcatggagagtggagagaaactaaccttaccattgatagggaaactcttgaagtgtcaacttctccatattaaatccaaggaccagcagagacgagaaaatgaaaagaagatggtagaagaaagaacaaaatcagaaaaagacaaaggaaaagggaagtctccaaaggagaagaaagttgccagtgccaagcctgggaagggaaagagcaaggaccagcctgaggccactgtaacagtgaggaagaccacacagttaaaacggaggggagaagatgacgaggccaaatcctatatcgatgatgagccagacgatggtgcccaatattacattattgttgtgggcttcaacaatcctcagctattggccattatgactgagcttggcattcctataaccagtgtgattaaaatatcttcagagaactatgaacctctacagacacacctggcagcagtcaggcagcaacaggaagctgtccttcagccagaagatatagaagctgaaaaattgaagagaaaaaattccatcaaggaacttgaggttttctggaagtacttggaaccaatcctgaataatgagaaacttgaaatacatctctttgatgttgctcgtctccagtacatggtcaaggcaacatattttccttctgattggtcagacaatgaacagatgcttgcattgggcaccgagatctttgaaaacattgcctgtttgatgtacgatagcctggactggaagaggcaacatcatcactatttgcaaagcatgcagctcatcaatgtcccacaggtggtcagtgagaagaccgtgctagaggcaatcacaatcccagagcctccaccatcaactgctccagcccccactgggaagaagaaagcacagtatgaggagtcgcatgctccaccaacaggcataatttcaggaagaactagagaacgcatcttaactgggcaatgtcactttctgcatttgacagtggcttttatcatcacaactgaagtagacatgcggtattacaatgacctgctgaatccaattccagaggaatttatttctgtgtccttgatactgcactgcatggtggaacaggttgtagcaactgaagaagatctcatcccgccaagtttggtggagccagcccccagagcagacgggttagactacagaatcgcagctcacattgtgtcgatcctgccttcactctgcctctccgaaaaggaaaagaagaatcttcgtgagatattcttaactgaaggagagagtgaaagcaaagccctgcccaaaggtcccctcctactgaactaccacgatgcgcatgcccacaagaagtatgcactgaaggaccaaaagaattttgacccggttcaagttgagcaggagatgcagtccaagctgccactgtgggaattccttcagttccctctcccccctccatggaacagcactaaacgactcgccactattcacgagcttatgcatttctgtacgaacgaagttctgagctggaatgaagtagaacgagccttcaaggtatttacttttgagagcctgaagctctcagaggtggatgaggaagggaggctcaagcccacagaaacgaccagtgacacagatgttgaaaatttcaacattccttgggacaatcctgccaggttcgctaagctgataaggcagcggtacattcacaggatgagcatgcagaaggccccgccagtagtagtagagattgaaaacactgagagaacactatttgtgaacaagaattttgccaaagctgagcaagatgcacaaggagatgaaaattccccaaattctgacgagcctgatgctattagtgtgacgggttctacttccaactccacaaaaccctggaattctagtaatagacagttctcagaaaaagagaccagtgggtccatgtggccccagccagagtccatggatcagaccatggacactgagatcaaagatgacgcagccacaaaggatgattctcctgaaaaagttcttcaggaggctcaccagcaataccgatgtgttgactcttactaccacacgcaggataactctttacttctggtttttcataatccaatgaatctacagcgtctgcaatgtgaacattggaatattgctcttcactccaacgtcggattcaggaattacttagaacttgttgcaaaatctattgaagactgggtcacacaggaagaagcgaagtaccaggaagccaaaatggctgaggagctcaacaggatcaggattgagttggaactgaaagccactgtcaaaacttctgctagcaaaattcctggccccaaaagatctaaaactaacaaagtatccagcaaaacagagctatcagaccaagaaaaagataaagaaaaggaaaaagacaagatccccttcgtattagaaggctctctcaaggagaagcccaaagaagagccagcaaagacgctggaagtgatagaggaaaccgccccacttccggtaccggaagtcgtttatccgttccgaggatacaatatgggagacatacctatccaaatctcaggaacaaattactatctgtatccttctgatggtgggcagattgaagtggaaaagaccaggtttgaacgagaaagagcacagatagagaaggaagctgtcagcaagtttggatctttttctgccaccttggaaaatggaatctgcctctcgataagttactatggatcaaatggaatggcaccagaggttataaattctgagttggaagcaatgatgaatattccttcagctatgacagcaacagtggttcctgctgtagtgactgttccccaaggcaaagggaaagctaagccgaaaggcaaagaaaaacacaaagattccattaaagaagaggaacttccaaaagaagaagagaagaagaatcacatacaggaagaagtagaaccagagatcgttatacaggaatcaccaccctatgtacccaccttccaaaacttaaatgtatcttgccccagtgggctcctgctgaccttcattgggcaagaatctacagattattccatcgtagatgaagaacccacccggaacctcatgattcgccagagctacccccagcggttgaagcactatgagttctataaagcagtgatgccacccctggagcaggaggcatcaagagttgtcaccagccagggcaccgttatcaagtatatgctggatggatccacacag

SEQ ID NO: 810 - protein, 1208 aa, Mus musculus
RDAQAWPQPSFEANEPPILRMAPKKEKPTGSANYKIWEPSLIAAHLNQNDWKASIAFVVGNRVEDDLLIHALDLAVRLPQRKLFSIVSWEDILQQMDEIQSLAESASAKKGKKPTSVNLPLHYEVFLAAKIIMESGEKLTLPLIGKLLKCQLLHIKSKDQQRRENEKKMVEERTKSEKDKGKGKSPKEKKVASAKPGKGKSKDQPEATVTVRKTTQLKRRGEDDEAKSYIDDEPDDGAQYYIIVVGFNNPQLLAIMTELGIPITSVIKISSENYEPLQTHLAAVRQQQEAVLQPEDIEAEKLKRKNSIKELEVFWKYLEPILNNEKLEIHLFDVARLQYMVKATYFPSDWSDNEQMLALGTEIFENIACLMYDSLDWKRQHHHYLQSMQLINVPQVVSEKTVLEAITIPEPPPSTAPAPTGKKKAQYEESHAPPTGIISGRTRERILTGQCHFLHLTVAFIITTEVDMRYYNDLLNPIPEEFISVSLILHCMVEQVVATEEDLIPPSLVEPAPRADGLDYRIAAHIVSILPSLCLSEKEKKNLREIFLTEGESESKALPKGPLLLNYHDAHAHKKYALKDQKNFDPVQVEQEMQSKLPLWEFLQFPLPPPWNSTKRLATIHELMHFCTNEVLSWNEVERAFKVFTFESLKLSEVDEEGRLKPTETTSDTDVENFNIPWDNPARFAKLIRQRYIHRMSMQKAPPVVVEIENTERTLFVNKNFAKAEQDAQGDENSPNSDEPDAISVTGSTSNSTKPWNSSNRQFSEKETSGSMWPQPESMDQTMDTEIKDDAATKDDSPEKVLQEAHQQYRCVDSYYHTQDNSLLLVFHNPMNLQRLQCEHWNIALHSNVGFRNYLELVAKSIEDWVTQEEAKYQEAKMAEELNRIRIELELKATVKTSASKIPGPKRSKTNKVSSKTELSDQEKDKEKEKDKIPFVLEGSLKEKPKEEPAKTLEVIEETAPLPVPEVVYPFRGYNMGDIPIQISGTNYYLYPSDGGQIEVEKTRFERERAQIEKEAVSKFGSFSATLENGICLSISYYGSNGMAPEVINSELEAMMNIPSAMTATVVPAVVTVPQGKGKAKPKGKEKHKDSIKEEELPKEEEKKNHIQEEVEPEIVIQESPPYVPTFQNLNVSCPSGLLLTFIGQESTDYSIVDEEPTRNLMIRQSYPQRLKHYEFYKAVMPPLEQEASRVVTSQGTVIKYMLDGSTQ

SEQ ID NO: 811 - DNA, 96861 bp, Homo sapiens
ccctggatatgccccactcaagatggatgtagaaattaaattatatccatggctttgtagtaaacaagggataaatgaagacgcttgtattcactgtaagaaaataagttgtccatgagattgaattaaccaagcaacagcatggatggctcatgagaatgagtattggtcggttattttgtttcttctgggtagccctagtgccaaggcacaacaaatccatgaaacatacacaaagcttaatgtataaatgacatttacaatacaggaaggaagatagaaaaacaaagcaaaagggctgcagtagagtaagtaatgagctaacattaagtcttaaaaatatatcttattttttaatgtggaagatagtgatgcaacattgaaggaactcaatcaaggtcaaagaaggtctcgtgcttgaggaaggagttgatgaaaggttgtagcttttaatatatgatgatgaaaagagatctccttttagggcgggtgagtctctgattccagttttacatttctggagcaattagcaggactcctcttggcttttcttggtctcctctgttagaagaatgtctctgatatgtaatatttgtttcaaaacccaaagaagctcgtttccttttgaggtttgccttactttttatgttctgaagttcattttgaacctcagattttgctccaagccataaaactggttggattgtactaacataatggagccgtaatttcagcccactgttgggggtggggagatagttaaggtgtgtagtggctctgtggtttctctgtggagtagaattccctgcaaagcttttccatgtggtgttttaatagctgtcttaaaactctctgatgcatggagcaaaaccgaattaagctcatgtgctagattggtgggatgggccaagaactctgtgaaaaacgaaagaaaaacaatcaaacagcctaagccagaggctacatggtacaaagaagatccccaggacatatctaaattcaaaattcaaaattactgcagcagtcacctcttttaacccatttttgcagaactttctacaggaaattagaatatttcccttgcatatattaatattttacatttatgtggtactcaacaaatttacaaaaggaccctaagtgtattcattcttgggtcctgcaatagtcttttgaaagttgtattaatagattcataattttaaatgagaaactgagtcacaaagataagcccaaggtcatttggctaagaaaccacagaggcagaatttgacactacccaaacctctctgcatacctacaccagaacttcaataattttaattagtcacatttaatatttatgaagacaaggaaaaccagccagacagtgtatacatgcacagtaaagctgtttctagactactgtgttttcatcagtgaatataagccatgtacagtgttgtctaaacatcaaaggaatgcgctctttctctaattcaaattctgggtgattcagaggcatgactccttccaaagtgctgagtttggctgataaaatgccacatactcagtcagccctcccatgctaagcatgtgtaaaagttctctttagtgtgtggttttggctgctaagttcaagaaacatttattgaatgcttctatatgctaggcacatgggtgaagcaggaagttgtctaggggtctgttctggtataattctaggggagccttttccactggaccagtccacagccttaaataccgccattagcagggcatcactttgagttagtccaggagtcactgggattcctttttggaaatgcagatattagaagaaatacttcaaaatggtcctagcactaaagcctctgggtgtgtatatatatatctataatcaaatcaactcttaagactctgagctgaatagcaggtaatacctaggagaaggagttagtagattctgctaaggtctgtaatgagccctgtgaagccagaatatagcggcaggccaggaaacgtgtcttattgcactaaggctccctatcaaaaataaacttcaatttatttcttttgtttttattttaagaactagcgctgcatgacatccatgttttagaccttgatgcccaaaattgatcagattaatatttgcagttcaaccagcaaacaactgattcattttcatattttttaagccaagtaagcagatccacatctctaatgaaaagtagcctgaggctgctttcttcccctagtcctctgtatggccacctcagaggtgatcatcttcatagtcagccagtgcacaaaatctaaaactcagtgtcttctcatttgactctaattgataattggtttgtttctatggttggtgataggttaatgtctctggcagacttgcacagggcacaaaatgacttgaagatttctcctgccacactcacattctcttccatggctctgaaaaaattattatacattcctttagaattttaaacataatatgttcatgattctggccctctcttccaaggacccaaaatactttagaaacacgtcagttaacaagtttattattatccaagagaaaattattatacaaactcttgttcaaactcatatttgcctttttgtgatgcaactgttgatattctgattgattttttttccctgggtctcccataagttcttcacacatgaagcagcttgcatggactagccatgtttgttctaatgaccaacaagagcagaagccccccaaaataatatctttaaggatggctaggattattgctaggtgctgtactgagaagggctttctataggttttctcattcaatcttcacaacaatcccaatagacaggtactgtcattatcttcatttatgcatgaggcacagagaagttaagtaacttgcccagggacacacagctggtttactgagattcgaatctgggctcagtgaatcgaacccaggctcctaattactgtgccacagtgacccatgcttcttcaaggggccaccacagtatgaaggaatctagtcatttgttggcagggggtgcttagggatctcccagatcattggccccattgtgcagatgcctgagtggggaagtagggaaatggtcaggaggaaaggagagccctggagtggtttgcccctgctcctgtcagtggtctctatacttgccttgtcacctgcttttcatagagcccattttgaaggatattacttaaggctaggtcacacttgaagcaacatcagcagactcttaattatagatccacatagcgcattgctgcagagtgtgtctttgggatgggggtggggtttgtatgcaatagagggaataaatctgctttgccctccttaatattttctctgagacagctttggtcttcccaatgaaaatcataactaagtcagtcttagacatgcagctcttcctgggatggcagctgtgatatgctggtaaatgtttagtaaccttctccaagtgaacatctctgatttgtagtgtttgtcatctccttagtttgaatactcctactgtagcatatttcaaattattaaggcaatcacactgaagagagttgggaagagccatgagcaatcggcttcaacacatcgctaaacagaggtcaaaagattagggtgaatcaagcagtagttgctgcaggaggcagatgtcaggttatagccctctcccagattatggaacatgacagcacacactgtgtgctgcttcagtctgcctcccttctctccccactccaccttgatattcttccaccataaatcaaactcataagaatttctaaggcaccctgaaaaaaaaaaagaaatcacagaatttgcagcctataggtagtaggttgagaaaggaagagggagcaggccatcaagatgccttctaataggagacgggagaaagtaggaaggagagagaggggaggaatggttttataggcaatgcagatttggatgtgagtctttggcttttttctcctatctggaggagcatcctccttcccctgacatctgcttgcatgtctaagtcactcctgggaaatatgtctaagcagagaaatggcctcaaggcccaattcccaaaccattgttactgacccctggtatggaccatgttagatcagatatagtgtattctcctcctaaaggactccagggccatggactgaataccctgcagtttcctgacatgctacattctagcactttatgatttgagggtcaaaaccatctcaggatccaaatgtactccctgttgctttgaaatatcagccaacagatatttatgtatagagccctgctccatttcccattcactgccaggcaccacaaagtgcaaaagcatagaaaacatcatttctgacctaatgagtttacagtctagatgagaaaacatgacagccacatatgtggtccaattcctaaataaggattactttaacagtattatctaattaagtgaaactatagcacttataataaattgtgtgagatatataattagagtctatcataataactacttgtttagtaaagacaataaaaagattagtgcatagcatggtcgttaatagtattcttgtttattatataacaacgtatgcccattttaaacatacattttcaacctattttacagttagagtcacacaaatatgattgtagcagccagttctatgtaataaaaatatttcttctgctggccaaaagcccataccaacactccttgctgatggagatccaagactttttttgaaggaaaaacctggtatgagaaagacattcacaaatccctgtccattttgcagtaaatctgcttaacaaaaaggttatcgtctcagcagagtattgacataaagtacaggtttgcatatctgtacagtgttaagtagctcttaataaaaccagactttttgaatgttgcattgattttacctggggcatttgtacgtcttctcctaataagggcgctgaccactactggttcatatagcttatcaggccctgttcagttctgggtataggactgtgagactctcatctcgagtccttcagggacacaggcgccctatcatactagcaaaggcagcagaagagggcttgcaagtcctgcccttgtctttccctaaatcagcaagttgctggtgctaatagagggaagcaattacaatccgattgtccaaaagctacttttcacttttgaaaaggcttttgcaattgtttaagaatatgaaatgcctaagtaaaatttggagaatttgcaatatatgaaagaaaaacagttgtaaatttaccctgtgtctctgggacagtaggcttatatgagacagccagtttctctgcatttacatgaatactttcctgccttaggagactactatgtaagtgtctgggttaagaagccctcctgctaggcctcaaattaggtgagactggtaaagtaaataaaaggaaatggattgtgtccatacatgacttcattccatcctttgaatggctttatcaatcactaggaggggtgagactcagcaatgatcatgtacaatacatgcctccaggtcatagacagctgacttgatttcctaagcagccgacttgatttcctaaggtgctttcggtgtgacagacccagaccctcttccttcaccattggatatatccagtatagcttttctgaaattattagtcttttctttctctcagctcttgctactaattacacccaaacttcttaaactatcttaaacttaaacttcttaagatagtttaagaagtttggatgtaattagtagcctgtggtgaattgggttgcacacattatactttcatttgcccacaatggtctacccttgttttctccatactaaatttctttttctgtcctgtgaacttaaatttaaggacttcatttagctgcatgttgggataggatatgggtggaggggtgtttttgattgtattttgccaaatctaatctgtgtctgatttttttcaagttttttatttctaaaaatgccgccagttggtggaagtttggaatctctggttaccctgaaatactaagagaaacactcagaaattgtatttgcagagaattgcttatttaactatgctgtccaattagacatggggaaatgacttgttcttcattagttgaatattgcacatttgctagcatcttactgcccccctgctgcagctcacaatgagtgcatccttctctgtaggcattctcagtttgtgttattattgtctgactggtccctgtcatgtttgctcaggttctggccatgtgattagacactaaaccataactctgacaaagttatgagtcctgttttgccacatagatgcaattttaaagcacacatttagtgggcaagagaccatagatgggaaactgggacagagctcgactcttaagaccccttgaaatggggagacgtggcctggaacccagctctcctagagagctctaaacaaatctgaacgtgctctcgcctgggcagactgtctcagagtgacttcagggacccgtgagtttcggtactgtgccatgacttggaggaacaattttatgttaagatgtctcctggagcaaaggaaggaacaagagctttgcgcttgagagaaagaaccttgggaaatttctttaacctctttgatcctttgtaaaattataatttttaaaaaagtaattatatgatgttttaaggatttaatatctaatctcttttttttcttttttctttttcttttttctttgagacggagtctcgctttgtcacccaggctggagtgcagtggtgcgatctcagctcactgcactgcctcctgggttcatgccattctcctgcctcagcctcacaagtagctgggactacaggcaccctccaccacgcccggctaaatttttgtatcttttagtagagatggggtttcatcatgttagccagaatggtctcgatctcctgaccttgtgatctgcccatgtcagcctcccaaagtgctgagattacaggcatgagccaccatgcccagcctacctaatctatttttgaaggcctatacacatgtatacatttgagataaatatttccctgatagttttattatggccaaatagtctgttaggtgcaatttaaggattatggaaagacattctgagcccaaagacttattcccaaaactgttctgaaatgatcacaaagttgtaagccatgtctgtggtctccatgaggttctgccaaaatgaccttgaacaagtcatttaacttttttggacctttgtttttccatctataagataatagtgaacctatcttgtagggtaacttagggattcaatgagataacatatgcctgacgcatggcagattcacaataattgttagttccctcttgcccctcctctcttcttttattttctggtctgaaatggtcaacacctgccttgacaccaaatactaataagtagatgggtaatggactacaataccctctttctcagttgccccccaaagagcagaaagacagccttttcttgtcaccattaactttcaaatattggcaaggaaacttgcagtggacagcgggataagggggtaaaggtggttattaaaatcttcagttttggaaggtgtagtcatcaggaacttcaaggtattgcctgtactgtaactgtgtgtactttattgtgaaatgaaagagatttttcccctttaatgatgactacagttgcagctttgactgaggaagcagacaagagaaaaaaggcatctaattcaggaaaggtcattacacattatacatatcatatctacttttaaaagtcagaatgtttaaaaaataaatggtcagtcttcccctggtgaatttagagacaaaagaatgttttcaactcattataacagaggaaaccacacaaagtcacacctacctgcatgcatgcatgcacacacacactttgcaagtaaaatatacatttttatgcttttacatgtgttttctgttttggtggtagccttgagaattgggtgagtcttgttaggtagttagtagacttccatggagctaaataagaaggatttaaggacaattgctctttgatggtaagaaagaattaatactaaagtattttctcccacctataccctagttttgtcgtcaacctgattataaagtgggcagaaaccagaggaaccaaataaaatgatgcattttattaaatttgtgtgaccttttcaaatcttagacattgttttggtattcaccaggagaccattttactatatttgaatcagacctctagagaggagctagagagttgcttagatattgccctgtccaacccctttattttatgaatggggaaactaagccccagagaggtcacatgactagagtgccctcccttattattccctctcttttctgatgtctttatcgtgtttgtttgtttcatctctccctaaaattgttagtgttcaaaagcaggaatactgatttgcgtgagtagctttccccagcatctcacagttggtaatgtgaggtaatccagtgagcgccactcttaatctcccaacagaaattacaattacaataaacaaagagaaaaaagtactgcatgtaattctttagtaactaattttttaaaattatttgatgcaaaatttcatgtccaagtgtaatatttttgcccatttcttgggagtgtaattagcagtaagattcctgtgttacattaagagaaaaagatgtggttcagttctcatttggcagctcatccaatatgacccaacatttaacagtttttttcagctgcttttatattcctaccactatttagagtcttgggatataccagggaacaaaataaagattcctgttttttgagacatcttaatgtatatttgtgacataggaatgaatgattgctttccaacaccagattattcttggacaacattctagtgaaagtgtcgttttaaaaaattgtcttcctcaaaataaaaggactagtttctccagaaaattgttttttggtcaagttgcatgaaatttggcacaatactgccgccttgcggctacttcaatcagaaaaccacatacattacaaggtcacctctgtctttcaagtaagatttacaggaaaattattctgcttctcagtggaaatatttgacacgaaatgacctattcaggaatatttaaaatctaattccgtctgatttttaatagaacgattggcaggcctccattgcttttgtggttgggaaccagattgaagatgatcttctcatccaagcccttaccgtggctgtccaggtccctcagcgtaaactcttcagtatggtgtcgtggcaagacattctccagcaggtacctgtcccttcctacctcaaagccacctgaagacttttttacttaaaataatagaatagaattataaaataaactatcatattcttgggctgttttgtaaattttgatggattattttaagtaactatttagccagaataaatttgagttgttcaatctggaagaatttatttttgtttattaattttgttaattcaatattcatttatttgacaaagatttctgaggtcataccaggcaccatgctaggttctgtgacaaaatatttaattcaagttaaataattataaaagactagactatttaagattccagggaggtacatgactaattggaaaatgaaggctacagagaatcatagctgtcagaggtcagaggacagcaataatatagaaaagatctgccaggtggcacatacccatacaattactgacagcttacgaagtaactataaatattttacctaattcatgggtacctctttcttgctaggttccccaacccttcagatcacctagatatttgaaagttacatatatctaagtattcttcaaataaggcttttttcatcataagtaaatttaattttcttacagattaatgaaataaatacacttgttggatctgcttcatctaaaaaggcaaaaaaacctgtaggtggtaatgctcctttatattatgaggtaagtgaaagtgtttatagaagatatttttgtgtttttagaaaaaagaattgaagtaataatttgatagccatttttaaatttcattctttgaaaataaatgcctgctcctcattggagatatttgttcctgatggtgaacacacacaaaaaaaatctgcctccttttaaaattttaaaatttcaaaatttccctttacaaatacaatttcctagatcgtttataccatcattgcatctaattgaaataattgaaaaatataaatcagaaacttctatagacacaaagtattgggtcatactttctcatgataattgctgagtatgtgacagcattaaggagagtcatatgatcagtatattacaaagtgttagtttctcgaaaaaaacaatgtaaaaatgcgccagaaagtgtttcttgtataagacagaggtacagctgcagtgattttccatcagtttgtgaacttggtgcacggtttatatcccactttaatcgatatgaaaataatgatactcttcggattaatggtccgttccatttccaacagctgcttagtataaaatctggcttggctgacccagtgggcttgtgcaaaggacgtaggactcattctccgtataaggggatttcttctcaccctgccttgttaatatctaacttacagctttcaagaaactataaaaatccagtgattaattagaatatcacttaaaatttgtcaggcactgttttatggagcagccgacctaaaacataaagagttttgaatctttctaagacgaacttgtttgcactttatttcagtgatgactaataaagtttttatgtgtctcaggtcttgggtgattacatacggtctatttagtattgcttgagtactatctgaacaagtttcattggatttattcacaatagacagtgctgtgaattttatagcattaactcttgctacgcggcgctcaccatcatgccaaagttatctgtgcttttgcagtcaaataatatactttgtctcttttttataatgttccgaatgtgtgtgctccacttgaaacattatgtgatacgtggatttaaaatactggaatttttcttgtgagtggctatagaaatccacatccaattctcaggcctgggatcaattaaccccccaaaagattctttcttcttcacagatactcagtaaaaatcagaaatgatagcagcctagttttgatgtctagtctggacaggcattctgacttggatgtgggatagcacaagattacaaacccagagttaagttagaaagccattcctctccaatatgtgctgagactcttggttgcatattcttcactcagggggtccatttcacatctggctctaccacattcttccagtggagcatttgggcaataagcctcccacactcgctcacatacactcttctgaatggttccagaagaaaagagaaggtgggtggagtgccatggagactgaacctgaggtgcaccagacattcattaatgccagtcgctgaagcaaaactaataaagaccataaaacaaattcaggctccttgtcagcatcagccaaggacaggttgcacatctggagaagaggggaatatttcccatctcagtcccttcacatttaggacctgctcaagcactctgctacctagtacctctcatcccaagacaattgaaaagtcactggcaacccctgcagagctgcatggtagttgcgagtggtggccatggaataggcccagaaagtctcttgggacttctggacctttgagacatgtggacagtgtgctcatgaatctatttctgtttagaatcttgcatggttgtaccaactagtgagaggtgaagctgcctaggcttctgggtcgggtggggacttggagaacttttctgtctagctagaggattgtaaatgcaccaatcagtgctctgtgtctagctagaggattgtaaatgcatcaatcagcattctgtaaaaatgggccaatcagcactctgtaaaatggaccaatcagcagtctgtaaaatggaccaatcagcgctctgtaaagtggaccaatcagcaggatgtgggcagggccaaataagggaataaaagctggccacctgagctagcaccttgcagcaggttcgtgtacccttgccgagtgtggaggatttgttttttcgctctttgtgacaactcttgctgttgctcagtgtttggatctgcaccaactttaagagctgtaacaccacgaagtcagtggcttcattctttgaagtcagtgagacgaggaacccactggaaggaatcaactccagacacactaggacacttgatagtggtaaactcctgaggagcgaaagtcttgcaacatcccatttctcaaaggaaactctgcactgtgggagaagagataaaagataatctaacaaattccttttgttacatggtaactttttagaaacctccattttggagataaggaactcacgatataacagccatgcatttaaacacctgtatttacttctacttgtagggtactctcgttagctttaaatcaaagcctagttattcttattttaaacacaattttaatcaattaggctttctggtttcctagcctgtggttgattagaagcagcaaactaaagtgagacttctgtatagtatacttcatccatgagtagtaaaatagtgtcagagccacattgcatatttccaataatgactccaaatgtctgggctagcaaagaccacattcctaagtgatttgctcaagttttcatttggatggcatggtgttgtgtacacacagcctcattatgagattgtgtaatttcccctgaaaccttagaatttcatctagccatggcattgtatatatgaaagtctttatttataaaccatagttctttgaaaagctgcttagatttgtgctaatgtaattctgtagagacgtagctgcagctcatttgttcattcacattctctttttggaaagcatgttttgctctactaggaactgtttcaagaactcatgtgggaatgagaacagaatattattatttgtgtatattctcaggaatgttggctactgctttatcatctcattattatttaataatgaggatgaagatgaacccatgcactggcatataagcaccatttcccacatgtgaatcctacttgaggatatggacacatttgaaaatatacgcttattgcctgcattatatagtagccggttttaccgaatattaacaaacatactcgttaaagcactagtgccaggcactatcagacgatgaagagagaggaaggaatattaatattataaagactctaacctcaagaagcaaagactctaacctcaggaagcttaagaacaagctagagagaaaaaaggacaaaatgtatatggacataagcctggcgcgtggtaggcattcaataatagttgctgcgtaagtgaataacacaatgcagaaaatagtgaagttcttgagagacaggtaaagtgtataagaattcaaaggaagatgagattatcattagctggggtagttggcagggaggggtgagacccagagacatttttgtggaaacattgccatttgaaaggaaaggtcctgatagttttgatcttttacatatattacatcagttagcccacatcacaattctaaaaggaaagataaaatctccattgtgtgcacggggaaatggaggcatagagaaggtaggaagtctgctcactagcaaaatgaagaatttggatttaaccaaaggtaaacctatagcaccaagtttttctactttatcaccaaccaagtaatctttcactggtctaccccttggataggtagatcttgactttcaaatgtggaagagggcattctaagaaaagggaatagctcaagcaaggccataggaatgagagaagaccgaattaatgtgtactacatttgtagttatatggtataatatatgctaaataggaaagatgaattccgtacatattttgatggcaactttaaaatcctaaagatggaaatctatgaggaaacatttcaaacactggaaaaagtacatggtttagattcatgcctgaacttaagtatacttgctacctatgcacaaataattttctgtgtatgtatgctttatggcccacatagaaaatctgacctgttcatttacaggtatagtcagtcctgaccaaaattaaaaaggaaaatatcagtagtcattcaaaaccaactgaaatgttctcgatgagagagttctacgtgtaccatagatgccaagattctcccagttgtgactaaatctgatacacagtaagtgaactttatgggataaatgtgcaaattttaggtttgacattatcactttggtaaatcagaaaaagctactagttgataggggtttacttatccaatttatctgaaatcagaaccaaccatcctaaaagtttttaaattccacttcatgtttcttttcatttcatgatggtggtcaccatgcctaccaaccaggaaatgagccttcatccacacaaatgggccgtgatttatgtgcctgtgacttatttataaaagacgcattaggtcatcacaaaatgaaaaataaaaaaaatgaaaagcttactgaaacaaaaattgtctataaagaataaaagttcttatgctctagttgatgactcacttatttcaaaacaattttccaagtttctgtacaataaagaacttgaactatcctaaacattatgtgatatggtgcaattttgtaaatgcaaataattattaattttttttttactcctgtcagtaaaaaaattctcatatttttaagaaaataatttttaaaataactttttaacaaatatatcttaaaatatttctacgggcctttctattgcaaccgggagaccatcaaatgtggaaagatttttctgatattagatttaaaaataatggaccaaatgcagtttaataaaatgtagaatgcaaattagatcttcagatctaatgcatttcaccatactttaagacactatgctagtgcctcagattagtatgcccagatgtaatagttccattttttgacttctgtttcctggatgtatagaaatttttctcaggtcttttccaacatgtatttattagtaattgacaagtgagaacacaggcttaattataatctattttgccactctttttcagattcctgatatgaaactcattttttaaacagtgccttgaattaatagtcaatttaatcgaattgtaagcccttatattgggggtggcccttgtcagaatgaaaaatggaaaactcatgcttcagagataggtacaaataatatgtgaaaacatttaagaggtttgaagttattaaaatggcagctctactgggaacagagagagcagtatgtcatggaagaaacgaaggaaaagggagacaggaagcattctctggccttttcaatcccgcgctttaaaacaaaacaaaaaaattctggaagaattggaagctagccaacctaatgccgttatttcatagagcttagggacacaccaggaaattgcaggccagttagtttaacttcacttgtaggaaaagtattaaaaactgctgcaggagatcaagtaaaaggatgcttagaaaagcacagcttgattaaggcaagcctggccaacgtgattttcggaaagggaaggtcatgtcttaggaacttgttgaaattctttgaagctattatggccagtacagtcttcaaagaatacagcaagactcagaatctgcggatctttccgttccacatcagtccttcagggatgcctacagaacgtggcccacaccagggcctcggcactccacatttagaaaccactatcaaaatagcagaaataacccctgatggaacattttttaaagctggaaccaattaatacaacctgatatttataaatgtaaaataatgagacttggaacaaaatttgggaatatcaagctgtaacaaagaagtgctacgttgggactataaaaacaatctaggagttcttgtgccaaaatctgggttttggaggcatttcttacccgaagaaggaaagaagaggagaaatagtaatgctagaaacggttacaaagggctatgaagagttacaaatgaatgacttttgtcaagatggggaaaagagcagtcagatgtgttaacagccctgggcccccacatttctggagggcaccaaagcagctcagcagagaaagtcaagttcaagctagtcactgaggggcagaaggtcagggctccattgctttaggaatgggctcccagggtgtgaatacgtttgcctcccagatcagaaacctggagttctattttcaaagaaaagcagaactcaagtaaaggcattcaaaaacaattcaaatcatgccccagctctcttccaccctgggggtcaggcagctggccaagcccatgtggcaaatagttagcagtccaggagaggggaggtagacactggggaggtgtggtggtgatgcagtggagccggggatccagcagcaggaagcccatgccacacaaggactgggttgctggctaggacctgcaggcagtgggcaaggcaggaatctcatcaggagttccaagacagacctcagtggagggccagccacaagaataaagtgaggttcagctaatgaagagaagtcatcacagcttctcctccaggtctgggctggggtggtttctgaaacctcttaacaccctatactctacagacaccaggattggaggggtgctggggaaggaatcaagaagattgtatcattctgtttctgtatttaaaactgtgaaaaatcaataattacatatggtgataataaaagttaccacttattgaacacatgtattccaagtcttgtgtgctgggtagttcatatatatcaactaacctaatctctttttttttggctggcttttttctttttgtggggaacaggagcgtgctatgttgcctgggtaagtcttgaactcctggggttcaagctatcctcccgcccctgccagcccaattactgggattataggtgtaaaccactgcacctggctaacttaaccatcttaacaacctttcagatacctatgaatgatgaaatttgaatcagactggttaggtaacttgttgattcagaagtctgttttttctacttgcatcacacacaagctgagaataaatagtttaaattctggaagtgactgttgtggtttaatatgtcttcaatataagctactgctagttacttagaattaagctttaaatctctcagtagttctatgatatgtttattacttttccttctactcaggcaaaaacatgaaggtatatctgcagatgatgaagagatcaaataatttcagttggagcttttaagccacttcgatgagtggcttttgcccacatgtttgggtcaacagggttttttaattcttatggttaagatttatatggttaagtgaccatgtcttttctttggaggatgaaagaaagaaagatggaaaataagagggaagttaatacatattcagcagagatcaaagtgtggagagacctttctaaaatctcactaattaaaactaattagaggtaaattcatctccagagtacctaccactagtttggtgagcgatatacctagtggttaaaagtatggaaccaaaccagactgcctgggatcatgtcctggttccactgcttgctagctgtgtaatcttgcacgagttacataaccctgctgtacctctgttttctctttgtaaaatcctcgtaaatgatagtatctatcttataaagctgtagtggtgattacatgggatagtaaatataaaatacttattacctggcacagacttaagtgtccataaagtttagctattactattactattatttttaaaatttctattctcagcaatattcaacatcagaacatgaaaatactagaaacccatttatgagcaggctttaaattttttttattatggtaaaaatatgtaacataaaattgccattttaaccatgtctaagtgtataattcagtagtgttaaatatattcactttgttgtgcaaccaacgttcacaactttttcatcttgcaaaactgaagctctatatccattaaatgacaactgctgatttctcctgcaccctggcccctgatgaccactgttcgattttctgtttctacgaatttgacgactctggatacctcatataaatggaatcatatagtatttgtcttgttgtgcctggtttggcataatgtcttcaaggttcattcatgttgtaccatgtgtcagaacttccttctttattaaagctgaataatattccaatatgtatataccacatttatcttatgcatttatccattagtggacacgtgggttgcttccacctcttagctctgctatgaacgtgggtgttcacattgtgaggaggtttttctctaagtggagtatgattactgaaagttaagtagacatttaattaagcaagtaagggaagaaaagaagttaatcagtggtcaaaggatatttgcagtgtcccattatactagtcctcatggccgtgatggagactaatatacattattcttctttgttatgtcatgtaaggggtcaatatgacggaacaccttaagaaacaaacagcagtagtaaccatttctaaaataaataattttaaaaataaaatttcatgtttatgtaaaaagatgattttcacactgcttattaaatcttcacgtgaactgggcagaacagttaaaattaatctccatagtgcaaatgaagaaatggaagcccaaaaacttaaatgatttgttcacagtcaccaatggaatcagcgtcagttcttctaatagtctagagcttgctctacacctggcagaagggagttctcattcattaaaaagttcttgctcatttatttaccacaagaaaattgtatataatggataaagatttgctttattacctagacatttattttaatgtgcattaaaaaataaaattagactaacttgcaactcccccaacactgtgcttcggacagagctaccttatttttttaaaacttgatttacagtcagcttagagaaaatgattaggtttatagtacaggtggtacatagctttggctaaatcatcaaatgatagtcaatgactaaggtttaggaaatgtttcattttcatgcattccataaatattcaaaggtctattatgtacaaaatctatgattggattgaccttggtgaacaaaatagttataactgcctggcctcatataatttacatttgaatgggggagacggacattaagcaaaactcaaaacaagcaaacaaatatatacacaattttgagttagtttcattgctttaaatcagagagaattactgaggaaaacactgtaggctgagtgtttggagatgaatgaaaggaaaagaagatccaactgaaaagagcaagggaaaatattcaggcagagggtgcaaaaaccctaaggcaggaataaagaaggcccgggtgcctgtagcactgagagtgggagacaggagaagcccaaagaggccacatctgctggctggtgagtccttgttaaaaaggagtttgccgttttatttcataggaaattagaaagccattaagactttaaagaggagaatgacacaattaagttcttttaaaaaatattttctggctgccaagtgaagaataaattaggatgaaggcaggcaaacatggaaatgagaccagttaggaggccactgggggtatccaggtggcaatggggagagcacacagattcaaggagaatatttagaaggaagaatttggcagatcggtgcccttgtgagatgtgaggggtgaagaagaagctatcaagagtgaatcccatagttctggcctgagagactgaataaaaatatcctttttttctttctttatgttttatagtttcattcctttttattgtaaattgacatttataattgaatacatttatggggtaaaaagtggtgttataatttatgaatacaatgtggaataattaaatcaagctagttaacatatccattacctcaaacatttaacattttttgtggtgagaacatttgaaatttaacaattttgaaatgtacaattctctattattaactatagtcactacactgtgcaaatttaaaaaaagaaaaaatgtatttttccttttaaactgagattttctaccttttgactattgtcttagtctgtattctgttgcttataacaatacctgaaattgggtaatttataaagaaaaggaatttattttttatagttaaggaggctgagaagtctcaggtcaagggcacccatctggtgggagccttcttcctggtgcgactccatgcggagtcctgaggtagcacaggaaatcacacggcaagggggcgaatatgctaatatgccagctcaggtccctcctcctctttttataaagctacaagttcccctcctgtgatcatctattaatctattaacccagtaatccatgaatgcaaagccctatctggtcacttcttaaaggtcccacctatcatactgccacaatggggattaagtttcagcatgagttttggaggagacattcaaacaatagcaaccatcatctttccattccccccaccccccagtctctgtaaccaccattctactttctgcttctatgagtttgatttttagattccccatgtgagtgcatgcaatatttgtctttatatgcccaactcatttcacttagcataatgttttctgattccatcacaaatgagagtttccttcttttttaaggctgaatagtattccatttaatgtatataccatatttctttatctatccatatgttgatgaacgcttagattgattccataccttggctattgtgaatagtactacaatgaacatggaggtgcagacacctctttaacaagttgatttcaaatcttttgggtaaatacccagaagtgagattgctggatcatatagtaattctatttacagttttttgaggaccctccatagtgttttccataatgggctgtcgtaacttatattcttgccaataatgtacaagggttcccttttctccacatcctggctgacacttgttatctttcatctttttgaaaaaaattatctgacaggtgtgagatgataccacattatggttttaatttgcatttccctaataattagcaatgttgagcattgttcatatatctgttgtctatctgcatgtcttcttttgagaaatgtctatccaccccaggtctcttgcccattttttttaaattttttttcttgtccattttttaattgacttttttgttttcttgttattgagttgtctgggccttttatatattttggatagtaacccctatcaaatatatggcttacaaatattaaaaatatcttctattacagagaaaattaaaggaagtctaaatttgggggaagtctgaaagtatagtttgagatagtttaagtcacatatgtctgaggggtatctaagaagagatatcaggaagaaagatatttttagtgtatttttcattttttgtatccttatgtgcctaactcagtgctgatacatagtaagtattgtagaagcgtttgttgtctgaaagaattaacttactaagaactaataacaaaataccattaaagactataagaagtaaataatgagccattttaacggtagtaattcagtagtaattgctggtgctttcctgggtaccagcaattttggtcctttccattttccctttattggttccacattttctacaatggtttgtatatgtgggtggcatcccagtggttcacaaagaaatttggttggtttcaactagcatgtgtgtatatgtgtgtatatgtgtgtatatgtgtggtttgtgatgtaaataatttttcttctataaatataggtcaacatttttgaaaaaacactgccttagaaaccttgaaacctattctctattacatttcctctctcagcctctcacttaatcctgggctaaatgatacagtgttcactcatccccagtctttcctcacccagcagacatttgctgggtttctattatctgctgggtaatgggcacaagattgagttagacatggtctctgccctcaagagcgcatagtcaataattttgcaaacaacgtatttgtttcctattattttgtgacattttatcataagaagccagatataaaagctgtatatttaagccgtggttataattgagtctgttcttcattgagctctgtggctgacctcacttattgttcacaacttccagccaaaagggtcatgatccccagacagagtatattggaaaggagaaggagggagagacagaacacttacccaaatagtcaaagatgcaacaaaaatacagaaggccttgtttccttagagggggagaaaatacagttgcaattgaaatatggtaacaattttcatgcttctgcatgtttttaatgtgacctctatttctgaaattctttctcctccatcttcagctgcaagaaaaggaagaagaaataccaaagtaaacatgggtataggctgggaggattgactattggatagaaattcatttatatattgaaaaggtactgtgcatattataggcactcaatattaatttgaatgaatgaatttcagatatatttatacattaaaataatttactcttctatttcacaaacatgattggccaaaaaaatcactctgcaaggtaattgaaatatgatttctatattgcttcaataaatactttaaaaataattacggatttagtagtttgaaacacaggaaacaaatcctacacaaactcttactcagaaaaactgaaattgttcaataaatgccttcctttaaaagtttatattttaacttcatacatatttggatcacagtgctcataccatttgaaatctgcagaactctaatggtgagctaggccaacaggatgccctgcatagtacctggtacccatgaaacactcttacactaacaagcttatcattgtcctcatgagcctttatcagaaattcatatggaaagacattctatctgggcttactcattcatcaggcaatccttagttagagattatcctcattatcaaatgaatcaccaaattattttcattattttgaattattattgtttcatttatccctggagttgcagagaagccagaacagtctaataacatgtcacatagtcacaggccaccactgccaagacctacatcttttgtgaagagctactcttgttgcatgctcaaagatccattttaggaatatcattgagggaaaaaaagatacaggctctatctggatttaatgcaaaggcctaatatattacatttcgtaactaatgagattttgaggaatgacagcaaatttctgatttgctctttcccccagtaaaatgtctgctttgagttatgcagaaagaattcttcttcctgccaacttgtttcaattccctatgcaaaagcatccacagaacattgtcagggctttcctatggaggttcatttcatgattcctccatcattaaaaacacacacacacacacacacacacacacatacacacacacacactttacccctttctttaaaacaagcaaaggaaaatgcattggtgaggtttgtatgtggtgctttccctttctgaaagcagagacaagtattagtcatcagatggggaaaagagtttctccgtttcaccctgggccagcatcctgttttatgcatgcaggcccgccctgtgtgtaggtggagaaggcagttgccgtgtgatgtgatttaagaggtgctggaagttctgcctgtccaaaaatagcccccacacccgcctgttgaattcaggcacagtgtccataaaaccatggtttaaatgaaatgaaactgcatttttagaatgttaacccattatattcgttatcctttcagtatgcatttatttatcagagataaaagctggatcctgaggggatgtacatgcattcggggagagtgaggaagcggttagcaaagtctaaggctaagagtaatgatgcaagtcactggaagcaatttctgcataccacgagtgcatttgttaaaattaaacttcttccatattcattcagatggtccatcagtcttttttgaatcaatattttctggaacatgacattttctcaaacaggcaatgctctttgctggaacccctaaaaagaatttaagaatgataaataacacacatttggaagatggtttttagagtccaaaatactttcacagtatgtcaaattttgatcccaccaacaaccttgtatggcagatttaaggcttactatgctcatgtagaaaatgaggaaagagcctcaaagaggttaagtgacttgcccagtgcctgcagttattaatgacagtacctcgcaatggaacccagtcattctgactccaaatccaaagtttgctctcttccttcaagctcttcaggacacaatccctgcagtcaaggagctgacaattaactttaacctgcttaaagctatctgtctaaactaaagagcgagacctggaagctttttccagtagtagtagtaagaaagtgtttcccattgtcttaaaatttccagttgcactgtgccaaagactctgctcacacacatttggcctcagaaatttgcgtgaggttttacaagtttactcatagcattccccatgcagaaaacatctcacatttagaatactgaccacttttcacaaacttgtcaaatacaacagtaaaccaagtcagggaaaataaaaatgtgaatggtcagaaattaacttaagatattctccagaaacacttagaacctaggggtgattttgagagtggggttaggacctgaagtgactgcgaagcctaggatttctttatcaaaacagatgtgctttgctccataattgaacacaccataccccacacacacacacacacacatacacacacacacacacacacacacacacacacacacacattgcttgagctgataaaccacagttttgtagtatctccagctcattcctcctttggttctggcacagtaagttcatagcacttcccatgacaccagacacttttttctgaactagtgaactagcactgcttgctttcctggcctttcagcaagcctggtttggtgagaggagggctggctggatgtccgccaccacctgctgatcacaggggtcccgtttataatacaaagcataacccacacagcatttgcaaagatctgggtaatttgtgtgctaattcttttattcagcacatattttactggtggccttccatgtgccaatcacaaagttaattccagccttcaaacagcttccagtcttatgaaaaacagatagggaaatgaacagttgtatcacattttaaaaggtgcaatgagtgcaccgagcaatgcttaaatctttttaaagttttgagagtcaaattttaggaaaatggcttgaaagctgaatgaagaagtcatgaaggaggagaggaattctaggcaaaggaatcaggccatgcaaagtcaggcagacagacagcaaggtatgaccaaggaactctagatggtatctctgatgtgtataaggagggaaattggaaggagtagccaggagttagtctggacaggtggctcaaggacaaatcataaagggccctagtatgccttgctaaggagtgtatggtttatcctttaggtatggggggccattgaggaattctgagcaggggagtaatatgctaggcaaagatgttagaaccacagtacgggaataattccatgggaagttggaggggtggcactgttaaaagcagttcattgctggatgcatttaaattgtacatatattttattagctgttttattattatagcaatgcatgttaactgcagaaaatttggaaaatatagagaaagcatacctcatatattaggtaggtacttaagtaaggaaaatattccaccactcagagatgtatacttcttgttataaaataggaattatattatatatgctctatatcatatcatttccacatactgtgatgttagcatttttctaaatccttattcagtgtatatataataaaaagcatgtttttctattcactaatttatttaaccactcccccttttgctaaatttagactgtttaccaatagcaatgaccctgattgtttccttatgaaaatttcataaagtagaattactgggtcaaagcatataattctttttaaagctcttgacatatcttgccaaagtgcattcaagacaatttgtatgaatttacagtccttctgatagttccaatttatccatgccctcttcaaccttttatttttattctagtcaatttgacaagcaaaaattataaggttgaacatttaatcatattttgattggctgtgttttgtgagtatggaattctttaaagtgaaatgatggtgtaattttgttttcagactccttgagataatgggagggactctgtattgtcaaaattcaggctagggaatatttcctttaagtaatttcacaacagatattaggtgctgtgaataatacaaaaaggataagccatcgtccgggccctgcacaagctcacagcatccttcagaagaaggacatgcaggcaaaacttctaacaaaggctcagctgcaggaggtgcctcaagggaaatatgaacaagggctgtggcaatgggagcagggagagtgatcccagatgaggaagtctgagggggttgatgcaggaacctctttggcatgagaccatctaatttccaacctcttcttgcctccttgtaccagtggcatgcctcaaaaatcacctaaagagtttgtttaaaatgccaattccagatcttagccaccatgatggggattaggagtatcttcaggagaatccaggaacataccttctgaaaaagcacctaggtacttctgagcctgcccttctccaagggcagccacacttacgtccacttgccgctcacagtgccagaagggggattgccctcctcaacgataaactctctctccatctgcactctgggccccctcgcgacccacccagaactggactgtggcactgcttatcaatttccattgcccatcatgcattcattcagtctttccttcatttttgagcacttgtgctggccactgttctagttgctggaggatattcatgccttcaggatattcacattctccaatctgttggagctctgcccaactcacagtggtcagcgaagggttagaaaatgttcatgctggctgggcatggtggctcacacctgtaatcacagcactttgggaggctgaggtgggcagatcacgacggcaagagatcgagaccatcctggccaacatagtgaaaccctatctctactaaaaatacaaaaaaatagctgggtatggtggcacgcacctgtagtcccagctactcaggaggctgaggcaggagaattgcttgaacccaggaggcagaggttgcagtgagctgagattgcaccactgcactccagcctggcaacagagcgagattccatctaaaagaaaagaaaagaaaagaaaatgttcacgctttgcctattcccctgctttgcaaggcaaggatggcactgcctgcatgcccagaggtacctaatgtctttgtcttacagcctctgtctaaattagaatacttctgctaaattaaaatacttctgctaaacatgcatgcttccagtactaggtgtagtttaccattacacaaagctagagggggaagatacatagtggaagctctgaaatacagaaagattttgaagtttgccatgggttaccaaaatatctaataaagcctggggttttgctcatatgaagataaataaaatgcctaaattcataaagagattatatatctgatcgtgtcacccttggttacctccctccagtatcaacctcatcccccagcccaacccggcacccacagccactttccagtttcctgaatatgctactttctctggcctcagtccttcttcctgggtcactgcctttctctggcctcagtccttcttcctgggtcactgctctcctctcgtcactcttccccagtctcataccacctgacctcagtcatagccacccccactgatccttcacatttcaactcaggagtgacacctgcagggagcctttgctgactctcccagtgtggagaaggcaccctctggggccaccacagcaccctcgcttacctccactgctgggcacagcatgcgatactgtcctgaatgctccatgtgccttgtagatgatctccccaactccacgaaaagctcactatgggcagggcctgcttcttttgtctttgaatatccagcattgggaatataatgggtgctctgtaaaagtttgatgaattaatggcaaggggaatccttaaagtgtgggccaagttaatccataaccaagaatggctccatctcaacagttcatgaaaagaggacatcaccaggttgcaccacaggaagagtccagctatagaaaatcctctgagtaaggatgaacaacatcaacagtgcacccttcaggggaccacagttacctcagatttgatccaggccaaccagaaaatccaagcatgggggactcacaataggaaaagctctaggtagtggtgaaatttgcagttaaacagcataaaacatggtacacaatggccatctgatttcattcaaaaattatctaatcatctactatgctccaggctttgaatttagatcaacgaaaaatagtagataaaagccaatatcctggcaggacttactttttaattggggagaggaagtaatggaagagataaataaagtatgtattatgttagatggtaataagaactacagagcaaaagggaggaaagggtgagaagtagaagagttactaatctgagtagccaggggagcaaaactggatggtgacacttgaataaaaatctgaaggaggggatggagctatgtggtcatctggggaagagcctcccgagcaggggaaactgcaaaagcaaaggctctgaggcacatttggtgaacatcaagaagggagtggagctgaaatggagtgatagaaaatgaaagcaacaagagatgtggccagtccatgtaggaactaatctgaagccacaaaaagaattttgaaaggaacctcaaccaggcagtatgagtgctgggttcagagtctaatcctaaggaatctatatcctaaggaagtgtctaaactgtgatctggctcacacctcatagctcattgtggtttgagtccatgataggagtccactagagaaaagactagtcagttccagaagttagaaaaaggtacacaaaagagaagcagacatcacattggctggaagagcagattctaaaaacatggtgctgtatctaaagattagtaccaccactatttaacccctgtgttcttgggaaagaatcttggtctctgaaccccatgaaataatgtttgtagtacggtgtctagcatagaatatgcactcaataatccacagtatactaaaatatttatcattaggttattggatcctgaataagagatgaataaccatgttggacatggcctcctggtgggggaattaatgtctttgttgcttctgataagattggctcagaaactggggtgaacatgaggctctgggaaggtcatcagtggatgaactggaaggactggggaaagtggggttggggatggagttaactaatgccattctaccgcagtcttgagatggctccccttgaacttgctgtctcagggtggccagctgtcctgggtgccagggactatcccagttttagcactgaaagttcaatccctggaaaaccccagagttggtcaccccagtgtcaatatgtaaatgacctttgcataattcttaaactcaaaagtacttaggaatccctagaaagcttattaaaatgtcatactactaggcccaaatcaattccagagattgatttaatagttgtggggtagatcccaggtaacccatatctttaactaggttcccagaggttctggggtaggtggcacacagcatacactggaggaaaactgtcctatgggaaactatgcagcatccatctgctcattaagggctttcccagtagtcagccaggagacataccctgtatgcctcctagagctaactaacaagtcaaagagattaagggggaggacaaggaaattcaaggaataagcccttttataagcagatttcattcagattaatacttagaaattaacaacagcctagaacatcatccacatcaagctggagaaacactacaactttttgataattgtggagaaaccaagaacttagggtaaatgaagacagggctgatacactgaatacattctttgtctagcaggacattagcagaaatcccactccaggactccaggctgtcctctgaaaggggcagcttagtaagtctaaatggaagaagaagaggaagaggaggaggaggaagagggagaagaagaagacaaagaagaggaggaagaagaagaaggaaagaaagaaaaagaaaaaaacaaagaaggaaagaaaagaaagggaaagaaagaaaagaaagaaagaagggaagaggaagaagaagaaggtagagaaagaagaaggaagagaaggaggatgggcagggggaggaggaggagaaagaaattaaggaaatataaatgcataactgagagttagcaagggcaagggtgaaactgacaatatgtgggctaaatacattattatgaaaggccacataagaaaccaggtacaaaacaatggttctcaaatctagcgtatatcagaatcacctgaggtcttgttaaaagcaaacactgctggccctacccccagagtttcagattcagcaggtctgcgttggagcccaagagttacgtttctaacaaattgtcaggtgatactgatgctgctagtctgggaaacacatcttagtattgtctggttaatttttaaaattctattaattagaaggcataaatctctccatatcagtatcaatttgttcatcttctaagttaacaacaacaaaaattaaagttggcttaaacaattaggaaatgtactggcatgcagacgtagaagtccaggcaggcttcaaggtcagcttagttcaggggctccagcccacttccctgctgtgctcttaccccttccttcatctgtgtaggagcttcagcttcccgaagaaggtaaagtggctgcagcaatctcatcccttaagactcttcccagagctttgtcatgaccaaggaaaccagatcaagcagccccagaaaaccatgcctcattctactggcctgaacaaaatcacatgcacctcttgaaccaatcatggacaaggggggttaggattatttttagtgtgaaggggcccacccatggagctgtgtttcccctgagtcacatgagctgaatgagagagagggcaatgcctgaaaaaaagtcagattctcctatgaaggaaggtgacatgatggaggagcaatcagcaacctctagtctgagaagtggaacatggtatccaaaccaaaggctaaattaacacatctagtgctccagtgttggggtgcaggaagttcagggaccagccatattcagatagctaagcaggcagcatgagtcagtcagtaactagtagggtctcaatcactagtctcagactgaaagcaggatttttaggaaaatgatttaagatttaaagagaaggaaggtagaaaatggaggtggctgccagcctgagtcatttctacgaagcagggaaatactgaaagcctttcctctaagaactggaacaagataaggatgcccactctcaccacttctattcaacatagtactggaagtcctagccagagcaatcaagtaaaagaaagaaataaagggtatcaaaattggaaaatgggaaaccaagttgtccctctttgcagtcgacacgattttatacatagaaaaacctaaagacttcacaaaaaacttttagaactaataaatttggtaaaggtggatataaaatcaacatacaaaaatcagcttttctatacaccaataacaaactagctgaaaaatcaaaaaagcaatcccatttgcaacagctgcacaaaaataaagtaaaatgcctaggaatctttttttttttttctttttgaaatggaatcttgctgtgtcgccaggctggagtgcagcggtgcggtcttggcccactgcaacatccgcctccgggattcaagcgattctcctgcgtcagcctcccaagtaggttagactacaggcatacgccaccatgcccagctaatttttgtatttttagtagagacagggtttcaccatgttggccaggattgtcgcagtctcttgacctcatgatccacccaccttggcctcccaaagtgctaggattataggcatgagccactgtgcccagccacctaggaatcaatttaaccaagaagatgaactatcattacaatggatactacaaaacactgtgaaaggaactgtagaagacacacaaaaaagaaaagatatcctttgttcatggattggaagaatgaatcttgtcaaaatgaccatactacccaaagcagtctacatattcaatgcaatctctaccaaaatacaaatgacattcttcagaacgagatagtttagatatttgtccctacccaaatatcatgttgaaatataacccccactgttggaggcagggcctggtgagaggtgtttggatcatggggttgaattcctcatgaatggcttgggctatccccttagagataagtgagctcttgctctgagttcacatgagatcgggtggtttaaaagtgtgtggcacctccccacactcccatcttgctcctgccttcaccatgtgaagtgtctactcccacagttgactgtgagtttcctgaggcctccctagaagctgcgcagatgccagcaccctacttcctgtacagcctacagaactgtcagtcaattaaacctcttctctttataaataatccagcctcaggtatttctttagggcagtgcaagaaaggcctaatacacagaaatagaaaaaaaaatcctaaaattaatatggaatcacaaaagaccccaaattctctaaagcgatactaagcaaaaagaacaaagtggaggcttcatactacctgacttcaaaatgtatcccaaagctactgtcaccaaaatagcatggtactggtattaaaagagatacacagaccaatggaacagaatagagaacccagaaataaatccatagttacagtcaactgatttttgacaaaagtgccaagaacatacaatagggaaaggaaacttcttcaataaatggtgctgggaaactggatatccatatgcagaagaatgaaagtagacctctttctctcaccatacacaaaaaccaactcaaaatggattaaagacttaaatgtaagatctaaaactataaaactagtagaagaaaacattggagaaatactttaggacattgatataagcaaagatttttatgcataagacttcaaaagcacaggcaaaaataaagtaaaaatagataaatgggattacatcaaactaagaagcttctgcacaacgaaggaaacaatcaacagagtgaagagacaacctatagaatgggagacaatatttgcaaattattcatctgacaaaggactaatattcagaatatataaggaactcaaaaacttaacagcaagaaaatctaattaaaaaatggataaaggaggccgggcgcggtggctcacacctgtaatcccagcactttgggaggctgagacaggcagatcacaaggtcaggatatcgagaccatcctggctaacacggtgaaaccccgtctctactaaaaaaaaaaaatacaaaaaaattagctgggtgtagtggcgggcgcctgtagttccagctactcgggagactaaagcaggagaatggcatgaacccaggaggtggagcttgcagtgagccgagatcgcgccactgcactccagcctgggcaacagagcgagactctgtctcaaaaaaaaaaaaaaaaaaaaggataaaggatctgagtagacatttctcaaaagagaacatgtaagtggcaacagctagatgaaaaatgttcaacatcactaatcagggaaatacaaatcaaaaccataatgagatatgatttcacccgttagaatggctattatcaaaaaaaaaaaaaaaaacagaaaataacagaggctggtgaggatgctaagaaaaaggaactcatagactgttggtgggaaaggtttttagtgcagccattatgaaaaacagtatggagatttctcaaaaaaactaaaaatagaactactatatgatccaccattcccctattaggtatttatccaaaggaaaagaaaccagtatattaaagaaatatctgtaccctcctgtttactgcagcactattcacagtagccaagatatggaatcaatctgtgtctgtcaacagatgaatggataaagaaaatgtgttatttatacaaaatggaatagtattctgccataataaagaatgaaatcctgtcatttacaaaaacatggatgagcctgaacaatctaatgttaagtgaaataagtcagacacagacagataaataccacatgttcttactcatatgtggagctaaaagtgagcttatagatgtaaagagtggagtcgcaattattacagtcagggaaggggaggaaaaaggggaagaaagggagaggttggttcatggatacaaaattaccactagataggaggaataaattctagtgttctatagcactgtaggtgaatatagtctaataacttgtatgtagttcaaatagctaaaaaagaagattttgaattgttcctaacacaaagaaatgataagtgtttgaggtgatagatatgctaattaccctgatttaatcattacacactctacacatgtgtaaaaatatcactttgtatcccgtaaatatttaccattattatatgtcaaaaatatatatatatatatgaatacaataaaaaataatacaaattttttaaaaaattgatatgtgctcaggccaggagacgagcaatagctggagctatcaggactgagggtcctgagtcacaggtccccactaggtctcaggaaaaaagaaacagctcagctatttagagttgaggcatcaggtaggagcaaaactagtaagggtagcaagaatatttaaacataaaaacctgggctaaaaggctctcaggctcttgcagctaagatggggattggccatggagactggggagggactaggacacatccatgcccaggagaagagggaccgtgacccaagatgggagtccagtagctccagctaaggggtgaaaaggcccactgtgaggccacacaatatgttgactagaaacaggattctggaaccagatagcctgggttcaaatcccatctctactaattaccggctgtgtgatcaccaggcctcagtttctgtatctaataaaataggtgataggaatactcacctcaaaagtgtaggtgaaaattaaatggattggaatatgtgaagtgcctggaacggtccttgtccagcacagggtgtgtgctacataaccatttgtgtgttacacagtctgagcacctactactacttgaaatatattcctaaagctttgtaattgcagctataaacaatcaaaaacatttaccttcaagccaaacaacaaaaagctctagagatgccattcttatgtttatttaaggagtgaatatactgtttgtctatatatgcatcagattctgtgaggggatttcaaaagatgaatctgaaaggatttaaccttccaagctagtagaggagacaaaccctgtgcacaaataattttaatacaagagacagctaaatcccttaggaaatatacaaaaaacgttgtagggttgttcagaagggaaggtcactacaactgcaaggaccaagaatgacttcagaggggtgggagcatcttagactaaggaaaagatcttagtctaaaaaccaaaacaaaacattgccatgatagtagaatcgtttgttgctaatacacacctaaagaaaagcccttaacttggtatgtcattcttccatacgttatcacattcagcttcatgtgcctttatacattttgcaagtatacaaaaacaaaaacactccttaataaaaaggaagctttgctttttccttctttgaagagtaattccagcaaacatttctaaaatagtcctgtgctttttgacatgcacatattggttgttcaaaatgtacacctcccgtaggaaattcattacattttaaattatacatgtctgttaaagcatagatctgttctaccttccatgtatttgttattgctgcttctgaaacttccttacagccccaaagaggtcttaatccctgtcaaatgttattatgttaccaacttttatgtagtcttgaaaggggttgtttatttagtttcagtgactccttgttactgccaaatattatttcatttcagcacagatgtaaggggtccaatgactggaattattttacagccctgacattgtcgagagatggataccagtttaattatggacagctgaaaatgatctaggagtcacctgctacagatatttatcatcattatgaatttctcaccaagctgtggtctgagcactttcataacgttccatttgcgttagacagacagtatgatctatatggaacctatatcttcagtcacctttaaatttatgtatagacagtttaatattgcttattttcttttcctcttctcaaagtgagaaaatatgtttcagtcattcctgttctttttcttctctttttttctgtttctctccatagccccctctcactgctacccttatcctttcagctgtttttccaattatgcctcattggaaattactcattacttaaagaatgtgaattggatagactagacacatacaggatcaagtaatgcaataactacaatatagttggccctaaataaatgcagaaagaatgaaggagggaagggagcagagggaacaggaaaggaggctgtaaaattacagaacactattgatggaattcctccatctcacatttgagaagaaattaatagcatattttttcctctacatcctccccattatacactgcaccaaaataaaatacatttttacaccttttctttttatctctgcttctctctaaagatatctcaatttgtccttttcagattggacaaagggttaaataaaaggggtagccaggttatggccagttgataataaattcaggtcactgtctcactgcccagttgctcctcattccattccattctctgctctcacaacttgggctgtggaatcttcaagaatcccaactctgtcctggatgtatgaataaccataagtactgactttagtgaacatttatcatgcatatgtcattcaccatgcaaagtatttacatgggtcatctcatttaattctgggtactgaattatgaagtcagcactactcatattctctttctgtagttctttctgttctcagttgggacaactttgcccccaagggaacatttggcaatgtctgcagatccctttgattgtcacagctcggtggaatacagggattcgctaaatatcctacaactcacagaaaaacctcctatggtaattacctggctcaaaatgtcaatagtgccaccattgtagatgttaaaaggatgaggtttaaaagggttaagtaacttgcctgaggctctgcagtgttacgtgggaagactggaatgcaaatagagcctgtacttttgcattaagttgcacatatgtagttatggcttccgcaactgattaatcatatcttgtaccaaaggagctaaagttccccattggaatcttatgtgagaacatctcaatacaagtggcccttttcaatcatttgcaaattatctgctcttccatcattttcatcaaatgtgcagaatcgggcccatctaaacagcctttcactctaaacagaaaattctgtaaacacacacacacacacacacacacacagacacacagacacacattggggcaatagttcctctgactttctaatgatataagcaaatataacaagatgtaagataaaagcagaatgtatatcatgctacctaagcaataaactttaaagatagaatatatggcaacatagcttactatgatgaataaattgcatgtatttaatatgacatatttaataataaacatagccccttgtatgctgcaggataattagatagaaatggtaaatagtcatcagtattctttttaaaatgccaataaaaaatattcataatgtttttctctttttatcagctcttcaatatgtgcaaatcagttttgacagtgtttttagatattgagtatattttaataatctgaataaacatcaaaggcagctgtgcaaacacacatattttgtgcacacatggacatgcactcatgtacaccagtgatccccaacctttttggcaccaggggctggttttgtggaagacaattttttcacagagtggggagcaggatgatttcatgatgaaactgctccacttcagatcatcagacattagattctcataaggagcacacaactagatccctcacacacagttcacaatagggtccacactcctatgagaatctaatatcaccactgatctgacaggaggcagagctcgggcagtaatgctccctcacctgccactcacctcctgccatgtggcccagttcctaacaggccatggacagattaggaactggccctaaccaggggatgggaccccctgatatatatcactaaagtcacacaccacatgcccacacacctatacaggcacgcatagataggtcccagatcttacttgccagagcagatttcttttgcctttactcctctcccgcaatacagaattgctgcctcccctttgtttggctccagccctccacccaccctctctgatgcttatcctcctctgaccctggctggaggggaagttccattttcccttcagagcctttcccctgaataagctagtcctagaatgtaacagcaactccaggcagggaagcccaggggtgctgctctcacccctggcctataagcaccacaaatgccaaaactatgtttacccagagccagacaggcatttcaaatttccagattacctcttacccctaaattctaaactgccacacctgttacttattgctcgaaaatacttcatcagccactagttcctttcattctataataaataaaaatctcaaaatatagctaaaccactggtataaataaactttattcaaagtgagctaccaagttaaatattttctattttcatggcaggaaggatttagtaagcaaaaaggtatctggtagctagaagtgggaggggtgtaacagagggattttaaaaggtaacagaaaggagccagaagcaaattctgtattcttcctattcttgccccataccagccctgtttatctaaatccaaacaaagacaagtttcttgtgtggccacaagcaatatcttagcttggaagccatagattttccttactcctcacctttagcactgtataaatctgagtacgccattgttattcaatacatgtatgtaagcatctcctgcattaataaaatttgccaaggatggtgctgaaaaggtatcattcctttcagtttgggcataaaataagagggatagagtgataggatgattaaatgaatattattttaaatgaaatactatatttcacttttccctatcatatagaccttctctgaccaaaacagtagccactagccacttgtggctatttacactttaattttaattttaatcaattaaaaacaaaattaaaaatttgttttttttttaatctcactagcaatattaaagtactcaatagtcacatgtggtttagtggctaccatattgtacactacagataaagaatattttcatcatcacagaaaaactattagcactaatatcaacaaataaaagttggagaatactcattgtttatatgggaagtgggggaacggaccctttcatacagttttggtgggaacaaaaatgctactaacaaaaacacacatgcacttcatagaaaaaaaggaaaactgaaattgtttaaatgtctgtcaatggggagctagttaaataaatgagcaaacacccacacaatagaagactatgctatttattaaaaaccatatacgtaagcaaaacttatcagcacagaaagctgtcctggatgtgtttttatgtaaaaacacaaaccacaaagcacttaatatgaatagtataatcccatttgtgtttgaatatacatatatgtgtgtatattttttactgtggtaaagaacgattatactcttactttaagtaaatttgatcaatcatatattagagaaatgagctacccaaaagaatgtgtgctgaaagcctgtttgcccagccttgtgctagcctaaattgagtcaagctctagcttatggattctgcttctgtttgctgaggtcttcatatatccaaagcaatcctaagttattcacctccccaaaataggttgaatatgaagtcatatgttgtgaatttttacagttactgcaataaacaccatgggcctccaagaaagtccctgaagccaaaggattcttttagtcggaaactggtggatatttggagctcctggagggaaagtgctctcccaggccatctctcttctactacccctcttctctctgcttcacacaaccacagcttgccctttcctctgccacctcactcccataacctgttccaagcaagagaaatccagatccaaatctttacacaacctcagaattcactcgagattgaatatgcagcaggttaagcaatgattcaagctgcttcatatgacttcttgtcaacacacaagggaaatcatacagcaggcttcatgggagtccattctatctctctctctctatcttatatatgcacatatatgcatatatgtataaatgtgcatatgtatatatgtatgcacacacacatacatgcatgcatatatttggtttccatgagagcgcctagggcaattctaagcattgggcttgtgcttactaatgtagggaggttctagagagaagaggaatgcttagaaggagagaggacactggtgtctgtaggtggacctgatcctcaggcaaggaaataatttggctcatttggtatatttttgttggatcaaatcattagatagtaaatatgatgtaattctttgagccaggacaatgataaaggaaatatttttatttcttagtgtgtacagaattacaagctccctaacagaaaaatagcatctagaccccttaaatatcttcacacaatacaacatgaacatggcttctgcctcagctgcactctttgaagcttaatttcctcattcaccaatcattcctggaactgagtgacctttggtctttcagcgtagagcctctctccggtcctggcaggcctctctgcctggagagctgacctgaagaggtcaggagacacaggccttgcctggcaacatttttctccattttaataagtctcatttgcccgttaagactcgtgcttttttgagttcctgattcacgccaagcacatttacttggcattttggcttaaagagaactaaggttttaacccattcaggactatttttctgactagttctggaagcttaaatttttgcctaattactccccaagcactgccagctcgctgctcacatgttctcttatgtctctcatcccccctataactatagccctggctagcttaccccccagtgcacacacatatgcacaggtacgcacacttattttgacatagatgatgggcaaattatctttacagtgctagaatgttggagatttattcttttaattaatacaactaaggccagggaggagaaacctttggagatgttatgtgaaaaggtacatttcctttaaattctgtctctttaattttttcttccctcaaaaacttgtccttcaaacagattcctgaaagatttgtttttcatctgagaccaaactactggctactgatagggtagaattgttaattatgggacatcagaagaaagaattttgaaatgaaattaatttgtaaacatttttctttttccgcctcttttgggaatgacccatataccatgaaaatgttgtctcagattttgagttcagcatagactttcattttcattaattattccaataattcacaatatcattccctttgggagacgcacagaaagaaagtggcatttagagagtcaagccttttcagagcaaccctgggggaggccaagtatgcctggcctctgccattcctagtggtgccaggggcaggctgtgcctttatgcaggatgtggcgcatcaagtctgcctccatgtgggccgccccagggcagttcgggaggaggacaccacccagggcactcctcaaggctgcctgtccaccactgctctctctctctgtgtctgtatgtcatgagagcatgtgtgcctggcaaactggtgaagcccctcatctcctgtctccccatgtcagggcaggacctcactgttactttgatgctgtgccagatttttgtttgaaaccacaccccacagatagttttagacaaaccagtaataactattatgacctgcaaaatacttttctctcaggatgttttgttatgctttgaatacattttaatacagtgaggtaacattcatagactcctagagaaatcacctccagagacatcccatccattgccatgacaccaggcaggcttcacccaaaccccccagacataggtgaatatcctgttttcacaggtcgtcaggaaaagagactccacaaccactctggggtaacacttttcagtgttgacttcccttcagcgctgtcattatctttgtattagagggaaacactagactgccatgacctttaaaaacccacatttgaatgttttgaatcagatgtcacagagcctgattgtcagcacagtatttagctggcattgaaaaatgcaaaccaaatattgacatctactcttggggttggacccagtcagacagctttcactttacagtaaacgcctgacctccatccccttaggatccccttccacgtgggatctggtcatcattaaatggtgaggttctgcaggtgtactgctatgtttttctgctcccaaaaatcacagccatcatgtctctttccctaaattgtgttagcaggagcagaactgccataaaaagcaaagcactgtatttcctagagtccttgcagggatttctgacttgcaaagatttctgacacttggttagttcctttggtttttagaaaaggcagctttaaaggaatcctttctctggccttccccttctgtgatgcaatgcgggaaccccaatgtgatctctatgaggtccagttacattttggcacatggtaatccatagagccttctgcagttagaagaaaataggtacctccctttcttccggctatttcccttggcgaagtaacaagtcaaaagcaactggactggtcaggaaagtcctgaccaagagctcagacaagacacagctccgtgagatgcagtgtgcacagtcattgtctgagaccaagggcctgaaattgacaccatatgcgccccaggagtgattactccaaggggggagaaaagcaacatgtcagaacattttagtaacacctaattcatcccaaggttataaataaatatgatgcttgcttaaaaacaaaagtcaaaaaatacttcaactagattacttctgtgacaatgcttcaggcagaggtgaactttattagggagacaacatgaataaagagaaacacataacaactttttatggtatattttacgtgattttattttttttgcagtaaataaagtggttatagggctccaaggaaaagggcccagatgttagagcgttgtgtgaaatttaggggaaacaagctgtaaaaaacacagtcataaaacaggctgtcagtgccacacatctggacaatacagctgtatgttcctagtggctgtcgtcacccaaagaaaactcaataaccttatttcaccccaattaggctgcataccaacatgatcaacattaagttgcaagggggagcaacattcatatggcgcctttgtgtcaaacagcttttatctttcatttgaatttagttacaaagaaataaaagactgctaacatagtcatttccactattataaaaccctgtttaatttataatatcctaataagtcaaagtttgacagtttggactactggctatgccaaacaatagactttctgtagcatgaatcaccctatcagtcatcctaaaatggagcccagcctatcttttctctacccttttcctggagtctgagtctaacaccatcgtgggaagcactctgccttattggaaaaagaagtcgatattcagacaatccaatttatttaaagtagagggtaaatgcccctctctgtagcattgaggcatttttttccctaacttttttttttcagccagcaatgaagtatctttccagtatgacaaataatataaaatttcctttcatcttttcatcactgacagactgtgccaaaggttataaaacatcactttttctaataattgtgtttctgtataggtgttaacggcagcaaaagcaattatggatagtggagagaaattaaccttaccactgatagggaaactcttgaaatttcaacttctccagattaaatttaaggaccaacagcgacgggaaaatgaaaagaaggtactgtacgatctggtgggttttctaaagagggcaagtggtgaatgaaatggagccaggtttctccaggggcacttcctctcttcttaagcctaccattaagtgttacctggcaaatttggctgtcacctcaacttcttagggaaaggctgtccaaagatctggaggaattatgataaacccattaaaaataggttccgtaaaatatgaaagtaacaatattcaaagcatgtgcccaggattgtttctatggcagtatatttatataataaagttgtagccaagaagggacccaaggaagagacagggagtcgggaaaactaaatatgaaaaggacagttggggggaaccctcacagttcgggtctaactatttaagatagtttatatgatactctatagaagtgccttttaaaataataggcatatctgcaccttcataataatctgaatatttcagcagcaatccatcacttctactcctatattgcacatctgataatttcttcatacctggatttttcatttaatttgcttatagaaatcaatctgtgtgctttccaaagactcatatttgcatatgaaaaatattttaaaatgctgttagcaaactactaccaggttcacatccatgtgctaccatcataacccaaaataagatgtttttcttattttccaaatcatgctgaattatgtttggaaagccaaatacttcagtatatacatatgtaatgtttgtgtgtgcatgtgtatgtatgaaatggatttgcatatgaagtcatttctttatgccttaagtggaaaaggcaaaatcaattcacggaagaaaaaacagaaaagtgaaaatgctccaatagtgccttcttcacctttgcaagacccccaaaatctaggtttcctatttgaattggcccctcaacaaggtaattgtagaaaaaaataataatgccaccttccattttcaatatagggctttatgttttttagagatatttcccatatagcatgttattagtgtggtacatattgtgcctagaaaaattctattcatattaacataattgatagtacagttttccatctagtgaaactctttccatcgtgttgggggagttgtaccttaagaaatactcagggtaattaagacttgacagaagaaaaattggaaaatttgaaactagtatagaaacatctcttgcctgtttaaattccaatgccatatgggaatctgaattataaaaagtagactgtaattcttgcaaaaatttctgcactttctgtttgcttcgccctttcccacagcagttagaaatagtgtgctaaagagcgtcaatttacttgtttaccacttattatgtcactaattgtttatcataggagtagactgtagatttcctttaacaaattttaagtaaaagcaaataaaatattctagtagcttggaaaacgtttttaaagcttgcaacaatataaaaatatttttgcaccattattttactcagcatttctttgaaatgtgaactctaataatacaattaagaggttctaaaggtatggaaataatctttatctgttgaaaatttgagagtcctgggtaactggggcatgaaccttagagtttttattttcttttaagtattagatacagtgagagaacttttgagcaattaagagccaatgattacataatctaatatgacatctccattattttgggttcccaaagcaccaaccccaaatctctgagtcacaaccatatgagtaagtgctaaataaattgatgaaaactcattggaatggaatacaatcgggaaaatactcttggtaaaggggagatgaaggcagttgtttgtgggatgatatcattgatgttcatttcaaccacactgcctaagaggtcagttgaaacaatcaaggttaatgcttgtcagccaaggagtttggcaataaagaaaacaagcagaaagtatgtaaaactgacaccatgctgtggattagaatatgaaaaaaagaaaagaggactttagctaatcttttcatctttcctgaacccacagtgagattccgaaatttctacaaggttagtgactgactcctcaactttttaacatcaacatatctgtgtagatgttgtctttcaaatgttaattaattgcttacctctgtacaacccagagtgttttgtatcttctatgtttaatttttgaaattgtatttttaagaatcagtgcttgaaaaatatccataatagaaattatagaaaatcttgggtgaaagtgagggcaaaaataagtaatatagctaggtacctgttctaatgttttaaggtatcactacatatttgatcctgttttaatcaatcaaaactttttaaaaaaagataaataatatagttttaattgccaaatacagtgaagaaatatcattattttcaactccactacttttaataacattttaaactgggctatggttaacattgcttttgctttctgctttgcaagaaagcttgctgggtaattcatattataagaaatacaagaaagatatttctaaaatgaacagtgttaatgccttcagcatgtaaatttctgggatacaaatgccggcctctaattgcaaataacttaaatctatccgaaaacatttatttatttgaaaataccttgttgatgaactccaaatataaatatcatgaagaaaatgcactgtatttccataaatatattttagtattttagaacttctgaatacgactttctcacacaataattctaaattagtttgattttattatatcttaaaacttaaagtgttttgtttagaaatatattttcttacatccttatcgcaacatttgcttttgcatttttatttctatctgttaataatttatcaattcaacaaacatttactgaaagaaacatttacaaaagcaatgtactgaacaaatatattctcatcatgttccttataattttaaaataaattgtttggtttccattctgatccattttaatttagtcattatctgaatattatatatctactcacatttttgtttctttttaacttcaacttttgtattatatattaattatgaacacatttaaagtcaagacaattttgaacccaaatattttattatattgagaattcaactaaaagaaaacacttgataattaaaaaaatgaaaaaaaagcttcgatacaaaaagtcattaactatttaaataattggccaaataaaatctagtcttaggttcctttgtgtttagttcagaatgtttgtacaggttttgggagaagatccaaatatattccaactgtgcttttaatttatgaattcaaataagtcgtccatatttccttagatgtttttagaaagcatatcttttctataaaaaattagttctttcttttgctagctcatatgcatggtacaaattgccctatttcctgatatactataattgaagagaaggaagataggcggtaaagaactagggtaactttttgtaatactggtaaactattcttaaaacaattcaaaattaaaagtgcctacgtttgataatacatcatgatgaagccacaagcaacccagagcctcctccaaaagagagacaaagagaaatgagagtagttttcacagacaccttccagcttcctccagtccaaacaccgaaacactggaaaccagccaaggtaatgccatttgtgtgtgtgtgtgtgtgtgtgtgtgtgtgtgtgtgtgtgtgtgtgtgttgttttaaaagaaaagccatacggacataccaggaaattacaggctggttagttttgattcagttgtggttaaaatcttcagaaactattttaagaaatcgaacagagaaagagcaggaactcagtttagaaggacccgtgtggtttcaggaaaggaataacttgcctcactaactggatggaattctttgagggtggattatcgaaatgaggatcccactaaaatggatgttgaatctaatgagcttcaaaagccaacaattcaggagaaataataaatgacccccccagatggcttatccataaaatagagtagtcctttcctaattggcttgcttttaattaatgaaaactttttacagacttcaggaaaaatgcaaagaaacatacatctttaacatacagtagtactttaaaatatggaaaagctatgattatagcagctaataattatagttagctatcattattgactatttggcacagaactaagccctttgcacatgttatatcatttaatcttttaaatgactttatgaggtacagagtattattctgagtttgcagatggggaaactgagggtatgaaaagttaaggaattttcccaaggccaaacagctactctcagtggaagagctgggattcaaatccagaactgtcagactccaaagaccatgctcttaacccccatacatatccttcctaagtgtgtctcaataattatgaaatggcactcttggctcacaatcagtagagtgcttgcccagagacatttccctgtaggaccaatggctgtgctcagtgatgtactcacaaccatctggttccattaattacattgcatttaacatcctcaggttaaatagggggacagtggtcaagggaaggaacaaaactcaccaaggaggaatgccctgagctaaccagccactgattccaaaggaaatcctgacttaatttccagtcctgccccccacgcagaaatggctcagtctctgggggaatctcttaaaactggacatccagagattattcctaatgtccttctgcatggtaaggtaggatagcattggctgatctagtactaaagtctttcatagactacatagaaaatacagagaaagaaaagcaaaacatttgcaatgtgtaaccctattataattaatgttaagattttggcatttttctttctgtttttttctgggatttgcttctttacgcagctgtaatcattgtaaaaatgcacccctttttcagttaagatagattataatttctactcattatcacagtgtccactctatcattattactggttttgtgatgttttattgactatcataattttcttaaccatttctctatcattgagcatttaagttatttcaatttcttttcataataaaccatgtactttgcagtatagaagtctccatattttggataatattcttagcatagatttattaaattggattaatgtttaaaaatgttcccataaccttgtatgttcaaagtgagccctatggccacttagacctagttctccatttaaaaaagaaaaaatggctcctggtcaaatgagcatggaaatcactgtgtattagatacaactcttgaagatatttaagaacataatagctaattaaagatgaaggagttttgtgaaaaccactatatttaatattgtttaacctacggtctctcaaatttatgtgatcttatacctttgtttagcctatctcttgtcccctatgatagcttgtttatgagatagggtgatatcttgaaagagaactagaggaacactcagaaaacccagtttctcataaactacataatagagtgaattagttacaaactctgtgagtatgttttcttatctatatcctcaacaatactattctgaggatcttattataaattttatatgaaacattgttatacatgaatatgtatatgcattattattattattattattattattattttgagacagagtttcactctgttgcccaggctggagtacagtggcacgatctcggctcactgcaacctctgcctcccaggttcaagtgattctcctgcctcagactcccaagtagctgggaatacaggcacgcgtgccacaacacccggctaattttttttttttttttttttagtaaagatgggatatcgccatgttggccaagctggtctcaaactcctgacctcaggtgatccacccacctcagcctcccaaagttctggaattgcaggtgtgagctaccacacccagcctacattaggcaggagaatcgcttgaatctggcaggcggaggttgcagtgagctgacatcgcgccactgcactccagtctgacaacagaacaagactccgtctcaaaaaaaaaaaagaataagatgaagtatagatatatatcatcagtttcactgacatttaccatttatcttcctttcattgtaaggaattaggagaatgaatacttattaattatatttgaattttgacatcaagaagtcatttagaaataaaatatgatctaaaatattttgaagcatccaataactaggttgccctattatagagaaggagaattttttatttttccctttaaaaagtgagaataacttaagattaagtgttctagataggtgtcactttatattcaactgaatatgtgaaatgccaacactttttttggttattgctgagacaagaatctcacatatgctatgtaacttaaccggttaagaaatctctgtgcctatccaaagccgtctcacagtaggaggcatctagatgctttctgcacatactgcattaaaaaaaaaaaaaagtaatctgtggcaaacttgactcttccttcatatgctggggaacatgtgttcctcaaacatcgtggagagaggcactttttggatatgcccctcctaaaatttgccttgaattgacaagagttccctctgaatttttaaagttgtgagctaatgaccttagtatgggaacatgcatgccatgttatccagaagcaagaaaggccagagaaagagtttgtatgaactaacttgagtttataacttagggggtcagctttgctgaatgcgcctgatctggttaactccattcccactcccagatttcaagacataaacccataagtgagaagggtttactcagaatgtgagaaaaaggaaatgaaagataggaaatgattttcctatgattggggcttggtacaaaaggatatttcactttgaaaccaaggtagaattctaggggccaaccagtcaatcactctccagaattaaagggacaaagagactgtcctggttcaacttcagtatgaaggatgggaggagtgagggatagactgaatccaggagaggaataagtagaccaccattatggtcagccatggggagagagcagaatgcactgggtagggtaaagaacatgttcaaaaatccaccaaagacatctcgacctggatccggaacccaggaagacctaggtacttccattcagttttattgtctacatatattttctctgcaccagagaatcctttctttacccaggaaattctttacatagtaatacatattctaccaactgaagatataacactgttaaatggaaaaatgcaggacaccaagttatatagagagaacaataacagttatgtaaaaatgatgcagaaagttaattcaaaagaatgcattgcacatcttcttcactcatcttccccaagtggtagaattgtggtggcttttgtaagctctttatatttttttccaaatttttagtaataatttttataagaaaaagttatttacagaagtaaataaggatttataagggtcctctttaaaaatacttttagctgggcatggtggcatgcagctgttgtcccagctactcgggagtctgaggtaggaggatttcttgagcccaggagtttgagtccagtctgggccacagagtgagactcatctataaaaactttaaacatttttaatacttttgcgaaggtgggggaggtaaatattgataattttaatgttaatggaaattagtttaaaatatactgttctccagtctcccaagtttggccttgctagaggaatgcaaaggcaaaaagaatgggagagaaaggagaagtgagcagagagagaaagggaagtgagcaggatgaatggctgaggtgggtggagtgctctggagaaagaaaagggcatcaagcaagtgtgattcagcccctgggaagacagagtagagggaggcagacaggtatggagaaatcaggagagcatcaaagacagacaagagtatcatggaaataaaatgagtttagggtttgaagtcagaccagcactctctaccacagttgtgtgtcttcggacaaactctgtattaatttataaaatggggataaaattacccatcttacaggttgccttgtgagatcaaattaaagatgatgatgtctggaaactatactctgctactagaatttagcacttcctttgaatgtttggttgtagtccgccctcctttctgcagaatcccagaatcccaagaaccaaatagaagaaagggccagagagttcctgagcttctagaactccagtctttgctaaaatggcttcaaagggatgagacttatgtggctgcacaggctctcacaccctacctaggagaacctggagggccagagggcctcttactgtctaacacatgatggggaggagtatctgtgaaatgatgaaatgaatgaatgaatgcataaatgaattaatgtttattcttccaggtaaactttaaaataatttaatctaaaatggtttcatctttttagatcaaaagatcaccctgagattttatttaaaattgcagttgtaaaagtttctggtatgtttttgatggctacattggaacttttctgtagcaaggccagctgtctaccaacatgttgcacagggtgttgcaaattagtaaatttgctatgatccaaagcttggctgttagagagccctgcatgagtcttaccagtgcttccaggccaactgcactcaggggcactgacttgtgccttacaaacccattaaaaaagagcatgggtgactggcctggctttgccacatattagctttgagtttgaacaactacttgccctcactaagactcagttttctcctccgtaaaatgaagatggtgctctacctattgtagttattgtgaagacttgacgagatagaatatttggactatagtaagaatgtaataaatagaaatgtaatattgataatgataaggatgataataatagtgacaatgacagccatgattagaatagccccttgctaatttactacagtaaatattactgtcagttttgtgggacagacccatcagcattaactgaaagttttctccctgtagacaaattgtacataggaaggcaaactgtcagaaacttatgtagtacctcaagtcttaactagggagttagtttaaaggtttacagtcctgatggcctgatgcagccccctgaccacatggctgtaactcccaggttacccagaccctcctatctgtctatcaggaaatctctgccctggacaatttggaattaacactgttattctctgcctctctgatttctctgattcttctttttttttcttttttgatgttttttattactgagtaatgctcttcttactggcctcttagttctctaatgattatttcctccactccacctcagccattgcctcccttgaaccttgtcatcactgaagccctcatcacctccaaagtcttgagatgtcctgttctctaaccttggaaatttcctatccttgtctcttactcataatccaatatcctcctacataatttcttcaaccacattataaatcccagtccataaatcccaacactttctattcattgtcctctcctgctatttgtttggcttaggttccatgatccaatcagtattatcgtttctctgcttactcttgattccccttgctcttctctccttccatcacaatcatttcgcaaaacccctcccaggatgaactcagtgatccatcattttcatttctattcctgagcagctaaacataaatggaggaattcacacaattaaacagactgatttcatgtaaaattaacaatctcaacattttcaataagttctcaccactggcagagtcctaccatattacctcggtaagcttgctcccccactctctgacataagataactcttacgtcatcttccctattcaaacctcctgcctctttcctgccttttctcagttgatgactttgcctcatgcttcacttgaaaaaattgaaacattttctcaacaccatcaagatgtctctgtttctggcacccagcctcttcctgttgttcttagttatgaaactaagaaattccctctccttctatcaaggtccagtcattggcacattcttttgttcttatcccatgttgacttctagagaacttcagtctcctcagccccgtatcttcactgtctccttctctactggatcattccatcagcctgcaagcataacatctcttgactttacatatatacataccttgacctcatacccccttgcatccactcacccactgaacaactcagagctctggttctgcttcacaaccaaacttccagaaacagttgtccataaaagtggtttctctattgatactgccctcctattttccacctccacactccaccataattgctcttcttcatgttacctacaactgccaattcttgtctttttgacctttttggtttcttagttctctagcttcacactatatatttttccctatctttttatccacttcgctgtctctttctgctggcatctctccctatacccattggtaagcattggagtctctagcatgatctcggactcaattctcatatttctcaagaaacttcacccatggtgattcatctcttcccatgcgattatctactatttgtatgttatgcacacctgcatttgtaactctagccaaatttctcttctagggagagaatgtgtgtattgaactaccttcttgacctctcaagaggcatctcaaagttgacataacactgttaatattctgtccaccttaagtaaaactcatttatcacccagtcttctctatctctgtgacaccatcaaccacccagttgctcaaactaaaatccacagcactatcttaatgtaccttcttattcagacttcatatctaatctttcaacccatgaagtttcaatatccaagatacatctcaaatctatctttcttcactctgccaacactttaatctaagtcactattgggttttctctggactattgcgagagtttccttactagtcttctggtttccaatcttgcaaaatcatagagctcctctacttaaaaccctttaaaatcttcccattgcattttagttaagacataaacttgttatttctacctccaaagccctggatggcctggcccatgctgtgcctcacacacctcatcttgggctactctgcacctccactgctaatttccctgctgggctcatctcctttcagttcttggaacacacgcagcctcttatgccttaggatcttcacacacacacacacacacacacacacacacacacacacacacactacattttccctgcttctcatgtgtatgactcttgcctttgagatcttcgctcaaatgtcacttccacagagagtccttcatcacctacttatgaaagtgttctcaattgtgtttctataacgacactgggttttattcttcatagcagtcacgaaaatttatagttacatttttatctgtttgtttgtatttctttttctctttctttccccataggctgtgagctcaaggggcagagccgagccccattttaggcaccaatttatacctggtgcagagagaaatgctaggaccctttcactcttctgtaccttacctgtgctctcgttgctgcctctacccagtgtttgtgagtgatacctgcagcctttactgatgtttccctctgctgctgaggaaggctgggacagaaactgaagctcataaaaatattcactgaatgaatgaatgaatagatgaataccagcatcccatacattttcagaacttccattctcattgaaattctattgttaagattaccgcatttgtgtcattggggatcgactaagggagatgtgtgtaaagcctggcaagcttgactttggcaatgccctcttttccttccaatcccctttttctgtctggcatggagcggtttccctggacctccacttccactccagggatgtattttcttcttcgcccctagctcttcaaaggagttaattttaccatttacatatgctctagccagttggatttttcttcactttctagaaatgggtgaggccatttcatagtctgtacctgcctccaccccaggctgtgagtgacacttgaagcccctgctgatgatgtccccttctgctgaggagcaggtacaaagggtggcagtttcatcaccactagagccataggtgctagaagccatgggcccctctgggtgccaaagctaagagcccttaacatccagaagccacatggagtagtgtaggggaagtgctcctctccccttctgcgttacattctgttagctggatgtcaaagcaacatatcttctcagtactgccacaacatttcagtgagtacaactaatttgtattaataaacacatgaactgaaagtgtaattacattatgaagtactgcacaacatttttggcaactgttgggaaagaaagaaaagcggggtgttggggcggaattaatgtttacatggtacatgccaatctaagcatgccccagagcatcatggaaggaattcatcttgccaactgatgttttattctgaccccatctttgaaggcatcaaatagcaaccattggttatgtctgcacattcttcagtaggattataataaaaatacttagttaatgctaagttccccaaataatcttttaatctttatttaaaaattggtcaatacattacttgtactatgaaatgctttatcaaggagattttagcaaaacatctattttcctttttatttttaattcttgttttgtttttaataaccaaccccacctctctctgagactcagacagaggctccccagggctagactaaaagataaacctaaattcctgacaccattatgtactcagaattatcttcccgccctgccttcaaaccactggggtggcttcttaggccacacttggctctcccataggactgattctcttccagaagtctctgtgtaaccagctttctggcacccactcctccagtcctcatgcataaatgtgccttgtcacaacttagtctcaagctggaatctccactatgctgacttatataatgaatacctaaaaaataaagagtatacaagtgattgaatgagatgaagaattaattcacctggcagtagaaaagccattgcttgctcactgtttgatttggagaaaaaagtgttctctcattccaggtaatagaagacaaacctaagttagaaaaggataaagggaaagcaaaatctcccaaggagaaaaaggctccaagtgccaagcctgccaaaggaaagggaaaggatcagcctgaggcaaatgcaccagtgaaaaagaccacccagttaaagcggagaggagaagacgaccacaccaatcgttacattggtcagtaaggtgctgctgccggcggtgcctttcacgagtgaaacacagtggcaataaaatgagaccagttaatttggtgactcacatagagcgcatagtttcctgacgccaattcccccacaatcattttgccctagagacactagaattttcctgcctcatgaactgtgatgcgattggagcagtcatcccaataactatgcttagtctttcccagccttttcactcattagaaacataaatcacttactcccatgacaccctgagagaaaaagacttctatttgcaattcatttgtgtctgcaagcaaatttttcttgagacagggtcttcctctgtcacccaggctagagtgcagtggcacaatcatggcttatactacagcttcaaaatcccaggctcaagccatccttccacctcagcctccccagtagctgggaatacaggaacatgaccatgcccaacttatttacttattaatttattttgtagagacaggatctctctatgttgccaagagtggccttgaacacctgggctcaagtgactctccctcctcagcctcccacagtgctgagattacaggcatgagccactacacctggctctcttaaacaaatatttattaagcatgtgtcttgctaggcacatttacacagtgcaaataaaggctgagatagccagttgactgtgctgccaaggagcttactatcttgttgggcacatataggaaagtcagacataattataaagcaaaataaaaagtgattatggtcatgagtgaaacacagtggtaataaaatcagatcagttaatttggtgactcacatagagcacatagtttcctaccccaactcccccacaatcattttgccctggatagagacactagaatttttctttcattttagtttcttaatataaaaatgattcatcctaggcagctgtaagtaattcattcctgccttcccttgaatgcaaatgagctacctgttgttatctgcatatttaaatgagatagcagagggctttcccatcctttaccagttgactcccctcatgcatctctgctctaaatccagtagacttggaagaagtgatattatgaagtccatgggcaatatcaacattgattagtttagtgatagaagaaaagtcataacttaaaaatgaaaagttgtgcctctgttgcactatttatatattgatcttaatgggcttttgtgaaatgtagtgcttttttgtaccatgtgctatcagtattaaagtataacaattattcttaccctgcagaatgtcacattctaaaataagatcatgtcttaatattaataaaatagtataaccagggccaaataaaggagaaaaatgttaggaaagtaagtgcacactatgtattttaaatttttaatgcaataaatacatagttactacataatccatactcgggattcacacccattgacataagtgcatacaacactttttaagggagcatgtccatattcattatttccctctcctgtaaacacctctacttataaaataccacaaagctgtagctatttctaattcaggagtaaagccagatgttgctcaaaagagattagaacccaaaaaagttacaggctaaactcttaacaaaaacccaagcacacattttatatgaccacaagccccatataggtttgtccttctattacgcctatgtcgcatttgcaaaagtgatttaatattttgtaaaatagtcacagccgtcttactggaagggcaataatgaaaaacagtcaacatgactgcattccagccaactggatcatttttggcaagccagagggattataaatgcatgcataatgtatatagccattgaactggctgagtgcaacctgctctcttttacaatgatggctgctcttctttatggtattttgaacagacgatgagccagatgatggtgcccaacattacattatagttgtgggctttaacaatcctcagctattagcaattatggctgagcttggcattcctataaccagcgtgattaaaatatcttcagagaattatgaacctctgcagacacacctggcagcagttaaccagcagcaggaagttcttcttcagtcagaaggtatgcagtctgctacacaacttactgagtccttcaatattacccactgtccttaaagtacaaatataattttctgtccaaaacatagtcttacaattagtacattattaaatcttttcaagactttgatttgccatttactctgcttgcaccagccaagtgttgtaaattttgcaaattaaaatcataccctgtatttatatcccctgtatcataccctgtatttatagccacagaaaacagactgcagttcagaagacttggttatccaactgccttttctggagtatttgatctataagttttacctaaaggatgcgctggatgaatcactgttaataatctgttcttgcagaagtcacagttcaagtagcccaagggaggtcacagccttagattcttgccctgttctgctattgtcttattatgagaaatcactggggtgctatcttcctagccttagactagcaagttgtgggatgaagttccaatcatgctaccatttagccattttgagccttgaggtcttcatctaagaagattatcctagatgacttctgttgaagggaagcaaaaagccactgtatactttaggaaatagaactagaatttggtgtaagattgtgttaccagatgcccaagttttttctgccatatgctgttgcttttattgttatttattaataatatcatttgcacagtgttttgtatcttatgcagccacatcccaatttttataacactacatttttaaattgctgctctataaagttagaaatagctacccttgataatactaataggtctcatatattgggcacatgtcttgggactaggctcaatgctaaggacattaagtacattgattcatgtggttttcacaacaagcctaggaagtatgttttattgtttccattttacaaaaatggactctcagtctagaggcagctattaagttaaaaagttgaggttcaaacctaggctattcctgatgatctcaaaggatagttataatactaaatggtttattattgaagtgagaaaatgctgcataagctccaaacacagtctctctgtaaaaatatttaatatataaaaataaaatattaaaaaatagactttataatagaataatgagatcttagtagtagaaactactatttaattatagatgtaataagcataaatatttcgggcaaatttttaagcataattttatggaaatctgtcattattttacagtaaaagtacaaatacccagagaagcctattgctatttaatgtgaccaaaaggtaactgaaacatacaacattgatccactctgttttcagcaatataagaaggagaaccagataaactgcatttgtaatcagttatgtagcagacactaagttgatttaaaaagtgatatggcagaaaaactggtcctatgtagattgtcatctaagagtgatggaaatcttgaacatatttagctcccaaaatgtgtgacgtagtcataatcttcctgggcctcaactataaaatgaaggcatgagataagttcatatttaaaatgaatctcagaaataaagttctctgatttcacaattgtatactccgacttcaaaaatttatcaaaattacattcctttatttacattttctggtactgtacagatatcttgcaatgcatatgactcaccatgttcacttaaagtgggaaaacatttaacactctcatttggtaatataaacatgttgctattattagatctagaagcagaaaaattgaagaaagaaaatgccataaaagagcttaaaactttctggaagtacttggaaccagtcctgaataatgagaaacctgaaacaaatctctttgatgttgctcgacttgagtacatggtcaaagcagctgattttccttctgactggtcagatggtgagatgatggttagtacacacattactgagagtgcatggttttaacatgtgacacagtggttctatttgctccatttattcatcacatagatagttactgagcgctgattacaaggcattgagctaggctcttttatcttcaggataatgataatatggaatgctcaatgatagttatagtctgattcattagcttttagtgtgtgaattaacaacaaataataagatgtagtagatgaggatcaaaaggatggtgattcttttatatggtgacacgtggctttgttttaaaactcaacaatgttctagacagtaattagaatcttcatatgtattaattttaaaatagtaaatttcatagtttgttaaattacatgtctgactttttatgtttcagttcatacattgcttttctaagcccttgcttttattcccccctttttttttttttgagacagtcttgctctgttgcccaggctgaagtgcagtggtgtgatctcactgcaacctccgcctcctgagttcaggtgattctcttgcctcagcctcccatgtagctgggactacaggcacgtgccaccatgcccagctaatttttgtatttttagtagagatggggtttcgccatgttggccaggctggtctcgaactcctgacctcaggtgatccacctgccttggcctcccgaagtgctaggattacaggcgtgagccaccatgcctggccccaaaatcttatttttaatatatttggccaagaaggtctatcctaataggatgacttgactttggccctgtagttatcaggcatttcccaagagtggggtttactggcccctgctattgaggagtttgcagagaggcaagactaaaaccgtgaaacagagaagcagtggtcaaggacccacatatctggtgctcagttatgtgaaacatactctaagtttcctactaattcagacaaagaaaaaatggaatgattggaaaagtagtgaatgacagatgcatgatggctttttaacaaaacggaaggtcaaatgactacttatcgaagatgttgtggaaagtattcaggcatccctctgctacagaaaatctctcaggtctctttctagttgacccttatcccaactaacaggggcctcggagtgttgaataccctgcaggacgatatatttcagcgttaagggagctgaaatgaaagcaaagtcctagggaaggaccatatcaagtgagtgctctgaaaaaggctgggcaaagtggagtgtggagggtggatgggtgtctgcacagtgactgtgggtagctgacaagaaaaaaaaaaaaagccgactgtctaaaagaagagtgagatcaaagcctggaactgtttctacagctgagggtaggctatggggcatggacacttctgactctgagtgtccctggttctattaccttgagatggatatgcacttaatgaagtaagtgaaaacgctgaagagggtggccagacttgaaccctgaaggatggacaggacttgaataagtagtaatggagagatcagtttgagttataaagactctcagcacaaggcattagatgtcactatgtagaaacaccacacttaagtctgatatcctggtgaatctcagccttgttctctgcgtggaaaatgaagctgaatgtagaaaagctgtgatagaaggcagagctggttctgggaaagactagagactccaaactccctttgtccttgcccctccccaccccttcatctagatgtgttcagctttcctgctttgtcttccactctcctgcctcctaaacctgacctcagagaaggacccactgtcctctgtccttcactatttcatgttgccttgggtcagtatgtttccctatcctggagatattggcattccaagtaacatatgaacattccaccctattttcttgaaactctagattatactaaaaaaagtgacatatttagggggaagaggctatttccttgggatcctgaaatcccacctcaaatccagcttcttactctctcttccacagaccagctgttctcccaagcatgtaaaatctctggttaataaaacccacatccacaaatttaaattttggagaaacactgctcctctcatttgggccaaggcctggctacataccctatcaggaacttgtgtatattttttgttcaacaagacacaggagatcccagccttataatccctgaaccataattcattcagaggaggctgcttctaagtcagcctcaagccaagtaccttttgctccatctctagctagggctccctactgtgtgtcttctttactttccaggcacaggctgcataaagctgaaatgcagagtctaaaatcgtgtacagtccattgcatcatcagaacatagatgtgaacactgtggtatacaatggcaacttcaaaggaccgagcaccatttctagcactctgcttctcactgcagtgtccacattttaatcacttccttttaaagaaagtggtagtggctatattttacttttaaaaatacagaatggaacagtttaaatggcaattaaagttcagaaaaattattttatgtggaaaaatattaccagtctagttatggtagaacattcctgacttcagaattgaaacattaatgtaaagggtctctagttgggccatgaaggtaactgtcaacaatgaaaacattcaggtctctacagagccaattaggtctgtgttgcccagcttcccagactgatctattagtcaatttgcaggtatttactgaatgtcatcttataccagggctgtggtctgggtccaactgtagtaatcttttaaagcccatgcatgcttctgtaagatatggtttgtgagtgaagcactcagcattgaggatgatggggagggaaagtcttgaaaatggttcagtcattaaattggattctagaagaaaaggccattgaatttaataggtaagatcacagttcattttaaacaagatcatttaataagcataaaaattataatctacccctagtagaagcagatcaaatgcatagtgtcacactttaagctatatctgtaaattgataatggcttcatatccaagataggatccatccaaggagccctcttcccctttgattggcggaaagcatttgcaacctttccaacctttggctgcaaacaagcaggctatatttctgttgaaccaaggtaacaaaagctttacatcaaataaatgcccttcaatgcatgataactgtccctggaagacattggcaacatttcaagttaagaccctggttgctgaaataatttgttgtccttagcatgtgatttgctgtttcattttaaaatgaattaactaggttaagctaagggatcattgggcaaaagctttctctatttcctagaaataaaaacaaaaacaaaaacatatttctatgccagaatttgggcaagcaataccagattgaagcttgactgaagaagccttggtcttagtgggaatgggaagccagccagcaaccaggtgcaccatagtgattggcagagctgtgcacgtcactggacttctgcatacaaggaaccatctcataccaccttacttcttgaactcagacataggatgagcctatttcattcttctttgcttccaggcagacagacccagccatcacaatgctttcctacttctggaaacaaaagcccaagtaatagaggtatctgagctacaatttgcttgtcagctcataaaacttgtgggtattatagaagcaatagtctattaggatttcttagtgttttgctgtagaggtagaacaggtgaaaggaaagaagtggagcttggaggaaaagaagaaatactgattgcccacatacttgtgtagatgcaacgtacttgggtagatgatccacaaagcagagtcagtgtttccattgtgttccttgcatagccaggtaagaaatcatctatagcttgtcactggctgaggatattaaagttacctaacgtgtttaggatttgagatactaagaatacaggccacactgctgaaactcatgactcagttatatttcttttagttgaagcattaattaggctcttaaaacattaggcagccatacggccctccaaaggaaacagtccatattgcggtaaacaaagaagaagaagaaaggttcaggaatataaatggggtcaccatggttgggattcagtggtttggagatttaggggtttgctttcctgtataaagttgatgggcataactgttaagagatatataccatatatctgattccaacagtgtaaaactagtaaccaattgccattaaatctctcacttgtagctgaaattgggcactgatatttttgaaaatattgcctgcttgatgtatgacatcctggattggaaaaggcagcaccagcactatttggaaagcatgcagcttattaatgttccacaagtggttaatgagaaacctgtattagaagccatgccaacttcagaggtaggcatgggctcaatgtctttagtgggatgaatgattcactgaacaactttattttcatatttataaggcatatgaagaaaaagttacataaatacttacattaaggtcatactgcctactggcataaaagatagctacatgatgggggctttgtgaagctcctcaactaccagacatttacaaaggcaaggatggaaccttcttgtcagcacttggtacaatgaataacatctgtgacaggaaagatattgacaaagtaattgcagtatttatttagcacctggctatgtgctagagctgtgcaagatgctggcaatacaataatgaaaactcattccctgtcctcctcattgaggttaacttttaaagaggatggcagtcaagtcaacaatgatttcaacgtagcatgatgaatgctgagagcagtcatctcagcttgcagtagaagaaataaacttggtcacctgatctaaacaggagtagagcaaagagagggaagtcaggaaaactgaaccaggattagcgatgtggggaaagatgagtatgaagtgcctaatggaaagcatgataggggaaagggatataatgatattctcaagacaggggcaaagatgtacaaagatatggaggtcaaggaaaagcagtattatggcacaagccaggagcacagggtagttcagtgatcccaggctgcatgtgcaaagtgaagaacaacaacagaaactaaacctggagaggcaggagccaggtcatgaatctcctttggtgctaagttgagagtctggtttatatcatgtaggcaatggagaactgctgaaggattgggagagggagaatgggatgactctgagtcacccaggggaaaaaagaaaaacctgtttgatgctcagtgccccatcaccccatcactttctccacaattgctcagtgggttctggtaggaaaaactgaataatgtctataccattaccttctttccttcatcaagcaaaactcttttcctttggttctaatattagcagatgattttgtggtgtgaacataattatacaacctgagtatcctgttggatctcatcataccagcatttgatgagggcatctctcagctgggtatctcagttgtttctttttaattattctttttctaggctccacaacctgctgtaccagctcctggaaagaagaaagcacagtatgaagaaccgcaagctccaccaccaggcatgtatgaaatcggctgctggaggatcaacaccatgagctggcactttaagagataatgactgccctccatattactttcagcctcccttcacctacagctcctgcatttattagtgcatagtcatagtttgaaattatgcatgaaattttgatggaaataatggagaacacaacttaattgggcaatggtattttctatattttacagtgacttcagtcatcacaactgaagtagacatgagatattacaattatttgctgaatccaattcgagaggaattcatttctgtgcccctgatactgcattgtatgctggaacaggtggggaggctttttcccaggttgtatacttgagtaagtcgtttcatctttcctggcttctgttatttttacactattttaaaattatactcataatacctaagtgcattctcctttataaagattagaatagttcagatgaaactaaagtctgcttaaatcttcagcttcaattctcttttcttttgctatgctctgaagccatttatgtaacattccctgaagttttggtagaacatatcctcaatactctgtgtctggtgtcattttaatggaagaggaaaaggaagagaacatggacaagtgggtgaggttgttaatagtctttatctttaaaatttctttcatgcttgtagatttaactagatttttgtatttctgaggccaatttttgtcatcagcttttttcttaatgaatatgtcttaataagtattttactggagttttaaatctgatacaatgtgctttacactattcacttaaatatgttttaaaatttcctctgtatctggtcatgtacctttcctcatgactgatgttatttatttgtgctttccttttcttgatcatgattgttaagggcatagctattgtattggtcttttcaaagaaccaggatttggtttcattgatcaacacctttttactttttattttattaatctcttcattaatttcttcatctatttatttatatatttgttatttatttaattatttttaagacagggtctctctctgtcccctaggctggagtgcagtagcacaatcatagttcacaatctcaaactcatgggctcagtgttcctcccacttcagcctcctgagtatctagaactacaagcatgcaccaccatgcccagcgaatttaaaataatttttttggagagacaaggccttgctatgttgcccagtatggtctttaactcgtggccccaagccaacctcccacctaagcctcctaaagcactgggattataatcatgaaccaccgtgtctggctcatctctgtcatttccatctttctactttctttggatttattttggatttcattttaattgaaagcttacttcatttatttttagtctttttgctttatttaaggctatacatttcttttcgagtgtttctttgtttgcatcctgatgctttcagtgtattcaattctaaatcttttatttatttacatgtttaacccatgaattattttgatttccattatttactgatgatttctaattttttaacattataatcagtaggcattttctgcaagttagcaaattcaaatttcctgaggcttcctgtgtgacctgatgtaacatggtcattgtgaaggttctatgtgtatctgaaagagtttgtgattcatactagtagcacatatgtagcacttacaggcgccaggcactgttctaaatgctttcaatatgttaactcatgtaatcttcagaacaatcctatgaagtaggaactgtttttatcccccattgtattagtccattttcacactgctgtaaagatactaccccagactgggtaatttataaacaaaggaggtttaattgactcacagttccgcatggctggagagacctcaggaaacttacagtcatagtagaagggaaagcaggcaccttcttcacaagacagcaggaacaaactaccacttttaaaaccatcaagtctcatgagaattccatcattatcataagaacagcatgggggaaaccaccctcattctcccgtcacctccctccctcgacacgtggggattacagtttgagatgagatttaggtggagatacagagccaaaccgtatcacccatcttacagataaggaaactgaggcacaaaaagtttttcaagtttgttcaagtaataagtagcagaaatgacttaaaacctagtgaatctgcacagaaaagtatttggatgccatttctgcattgtcgtcttccttttaatgttgctgttaagaagtctgatgtcaatctgatacttttttctttgaagataatctttacttttctttctagcagctgttagggttttctctttataattgataacacaagactatgtctaggtatgattttatcatacttgtccttatggtgtaagggaattatcatctgatttccagtcacattctgtgtgaaataaaaattccttacactgtcccataaaggccctaaaaatagggttctgagatgtacctgtcatctcacctcctacctgccaccacacacacacacacacacacacgtcatctacataggccttctggtttttcctcaaatatgttgcttaattctatcttaaccttttactctaccttctctgcctagaaagctttctctctttctggagggtctccagtagaagtgtcaatccttagagaggccttctctgaccacctgatctaaagaaccctctccccacacaacacacagcactctctaccacatcaccttgttttattttcttatcaacagcttttctttttgcaatatattgatcagctatttttttcttcccttccccgtcctcctactagaatataaactccatgcaagcagtaacaatgtagtcttgttcgttgctgtatgctcagcacacaataaccacacctaacccatagtagacactaaatacatatttgttaaattcagaagattctaagaaagtcttctatcttcaaatatcatttttcctatcgatttaccttaattattattgaatgggtgttggagtttcagggtttttctctttgtcttttaagttttctttcaattttatccctttgggaattccagcttaacttcctactaatgctttcttcagggagtccagtctgctattgaagttttgttttggcagtaatgtttttaatttgtaaattctctactttttttttacaattgcctattcttgtttttagtgcatggatgtgacacattttttctgttaatacataaaaggtttattttaaagtccttttcagactctatcatctctgatacctcccatatacatttttctggtttttgattgtcttagttttctaaccaattagataatcacactaatatttgcctttaattgctccatgaagtttttagaagatcaatagttttattatatcaataaatgataaaagtacaaaagctctctagaacttgcagtatcattattttatttatcttatcctttcttgttttattttactaaacttaaagcaacaaacatttattaaccatctactatgttccaggtaccaaagaagacagttaatgagctcggcgcctaacaaatagaagtcaaccagtagatccatgttgaatgaacgaaggcttaataataataaggggatgaaaaaactgaaatataggagtgatgggatgatactttataggatgggatgttagaattggacatttcagagaagaaacagatttgagtgatcttttatgattgaagtgggtcaaagaaatgatcagaggatagaaagtggaaacagtgagtgactcttctgacagtagggtgtttctacaaggtaaagaataggatgcaattttgttattctagagcagtggttctcaacaggaagtgattttgttcccagaggacatttggctatgtctggagatatttttggttgtcacaactggaagggtgctacttgcataaaatgggtagacaccagggacattgctaaacatcctatagtgcacaggacaaccccccacaacaagtaattatctaggccaaaatgtcattaatgccaaggctgaggaaacttgtagagggataggaaatcatagaggatgattataggatatagggtaaagggaaaagctgtaaattaggtgcctaacttgattatgtttcaacctcttttacttgtttaccatgaaaaattgaacaaggcacttaatctttctagacctcactttccccacttaaaggagacactattacatttactgatctcataatctaataacttttctatttttgaagaaagaatgaggattgggcctgaaccccagtttcttccactcaatatccttgagctttggccagtcaccctagttttctcctctatacaatggaaaataatatctgtccccacaagattgctgtgaggcttaaatgatcacatgtgaagatgtgttacatagtacctggcttgtgatagacacttaataaatatttaatgaatccaaagttatatgagcactctttccactgctttaagatagagtaaatattaagaaaaaatgttattattctatttgactagaatcttcatgaaatatttttatcaaaaacttattgttaccattttcatgttatctattttaatagaaatattaaatttatatctaccttaatgcatggattgcgaacacttttccttttacttggtgatcactgatagtttcctgccattttgtgtcatcagtggtacttgggtcccagaaatggactggttcttactaagcagtgggaatgcagcaatgagcagtgagtatcactaaagagcggacccttacaccaattcctctcattgttgatttcaacaggttgttgcaactgaagaagatctcgtcccacccagtctgcgggagccatcccccagagcagacgggctagaccacagaatcgcagctcacattgtgtcccttctgccctcactctgtctctcagagagggagaaaaaggtcagatagcctgagatagcagagtcttcatgctttggaaaagtatagatcctctctttaaatcaatattgtttcaatttgcatagaatcttcatgacatatttttatctgaagaagaaaatgaaagcaaagcagtgcccaaaggccccctcctactgaactatcatgatgcacacgcccacaagaagtacgcactacaggtaataataatcaggttagcccaaggaaaaccgatgtgggaaagtgtgtttataactattcagttgaaagaagctaattagataacttcatcaacactaattaaaatgtaatgtacaaaatagatacttgcatacaaagtaggacctggaaaatggacctagatacagggaaaaatgatgtcagccgaggaaatttgcctgattattgaggtctaattaacaattcaattaattgttaccaccactaaattttcattaaaaccttataattatttgcttcaaatatctgctgctatgaaaaactagtagaagccagaaaaggatctcaaaagagagagatgaatatatatgagactttggcagtttgtcactgtgaatgaagaatcagtcatttttgtgcaccaggaaatcctggcaacataggaactagctttttgaccttcagcaaaatcccaaaagtttgtctttcccaattaccattgatttcccctgttcccaaataatgagggtgaaggtatcatgtttagccttctccatatgcataaggcacttaacagcttactctaatgtcttctgtcatgttgctctttttcatcaggaccaaaagaattttgatccagttcaaattgagcaggagatgcagtccaagttgccactgtgggaatttcttcaattccctctacccccaccatggaacaacactaaacgtctagctacaattcatgagcttatgcacttttgtacgagtggtgagtccattgctttgtcttagcttaaactcaatttaattaatggtcatatatgcctcttaaaattacacccttatttacaaaaagtattttcattattgaaagacctttcagaggctaaggtgggtattttgattgactacaactttcttgtttgaataatgtcattagcaatgttatcatagctataatgcataacactcttcaatttgatacactggggtttttttcccgttgtgttttcttaaccacaataattcccttttttcctcgttttcccccatctctgtcccaaatactcccattgacgtcattggagatgatgtggtaatcccatcctacttacagagaagtaaagggctgtgtgtgtgtgtgtgtgtgtgcgcgcgcgcacgcgtatgcacgcacgcatgcacgcatataatttccaggacaatgctgtccttctgtcttctgcctgaccactgcactcttttatcatcattgcaaatcatgtaaaaattacagtaacattgcagagacattatctggaaagagggaagagcaacctggaccatgcaactttgctccaattcagcgatacctgtctttgaattttcatcttatatcctcttgttgcagccacccacaatcaataaaacacaggttccagaagaatttttcttctgtctctttccattctgtcctttcacagttctttctttttttaattagagaagaaaaaaaaagaagaggatcgagataatctgaatttggcaggaatgttcaccagggtaaaactaatgtgagcactaccgtggaccatctctgcacatgaggacaggaaggaactaagaaagagtgtgacttgggaggcagatgtagatatcttgtaaccagtgctactggaagctcatatttaatcctatcttgagagaaaattctgagcacactatttataaccagaaattaaatttgtatctagaaagatgaatcatagaaccataaaatttcctaactgaaagaaaccttggaattaatctaatcgaaatctattttcagataagaaagctgagatcctagcagggttaaattatttgttttaggattataacagtggtggaaaaaaaaagaaaacattctggtctctggatacccagtagaacacaatttccttacattactgagcaggagtcaggaagaaagccacctcagaagtctgatggtacaatctgcaattttaagcacccgctctgcacctagagatacacagatgaatagagagcccactgtcagcatgttgctgagcaggagttgactcaagctaacagcttctcacagcaggaagagccattttatgctctttgaagacagtgggaagaggggtcattaagatacaatatctagaatcacgtctcatctgagttcactgggattttgtgatataggcagtcatttcccaaagcaaattctcattcccacttaagggaatatgtagatactacctataagaaaggacattaacttccacagacatctttacttgacaaggaagcatttgacctagaaaagaaaagagcatgtgcatattcttccttaccatttcctttgtaagcctaaccgaactaaaaaatatttttatcttgatttctttttccacttttaagtaggcttagtaatagaaaaagccaggaacttctgagtcctaccattgactcctggacatgcagggtatagcctcgagggcctggtatgtcatttctgttgtgcacataactacccccttcctgagtagggggtgaacttctgtcctttttctgtgtcctgccaccctccacttctccttctggcttaagatgtgactccattctcccttcagctcagctctctacgcagcacagcatttttgttcctgctgccaccattgaaacctcacacatatgctgcttacatgccccatcctggacccttggtgctcctcccctcttcctcttttcccttttgccacatcatgcttaacaagtccaaaaccaagctcttgattcctcatccctaaatttgtcccttcaccatctcccttatttcaatgaatgacaactactttctatcgaaaaccttggagtcatccctgctgtctctgtttttgtttttgtttttttgagacagagtctcactctgtcgccaggctggagtgcagtggtgtgatctcagctcaatataacctccacctcctgggttcaagcgattctcccacctcagcttcctaagtagctgggattacaggcgcacgccatcatgcgcagctaatttttgtatttttagtagagatgggctttcaccatgttggtcaggctggtctcgaactcctgacctcgtgatatacccacctcggtttcccaaagtgctgggattacaggagcgagccaccgcgccccaccgctgtctctgttttctcacacactgcaatcaatcccaccatactcctcactaccatcccagcccagtcccccaccacccctcaagtggactattccaatagctttccagctggtctacaggctttcaattttttaccaacagtcttttttccacacaaccacctgaatggcccttctaaaatgttggttggatcatgtgcctttgtaactgaaaactctgcagcagtcacccagaataaatcctaaactgggccaggtgcttggctcatgactataattccagcactctgggaggccgagacgggtggatcacttgagctcaggagtttgagaccagcctggccgacatggcaaaacccatctctacaaaaaatacaaaattagccgggtgtggtggcacgtgcctgcagacccagctacttgggaagctgaggtgggagaatcacctgcactccagcctgggtgaacctgtctcaaaaaacaaaacaaaacaaaaagcaacaataagaacctaaactgtctgccacctactttttgagccatcacctatcaagctgtcatgttccattctccctcatctacactggcctcactgtgattccttgaacatgtaagtcacacccctgcctcaggatcgttgcatttgctgttttcccttcctcagtcactttcccccagatatccatacagcttgctcccctacttccttcacatttttgcttaattgttcagaggacttttccatgactgctttatataaactagaagcccctccctgactattatcactttttgtcccctcagctggctttattctttttgtcatctcttttatctcttacatttatctgtttccaacgactagaatggatattccatgagagcagggagctcactattttgttcaccattgtgttcccagctttcattatagttaatgatgcctaataggggctcaaaaaatatttgagaaatgaacaaatgagcaatctctccttccttctgtaactcttttacctcttccttgtctctcttctgaatctccctgttttttcccaaaggacctgctgcttttctcatctttgctggagagaaaatggaggttacttctgaattattgatctgcatcattttatttttttctgattgaattccatgtttatttgttaattctacttctccttcctctaccttggaacttctaaagtgtaagagccaaatcttgattctttcaaatcccaggcacctgtgacaaagcctaatacgtagaaaataataaccaatgaaagagtgagcaagtgaataaatgctgtaaaaaggtaaatacacaattataaagcctgctgaaagctgataaactttgaagtgcaattatggaaaatactgcagcagtttatgtgcacaggaggaagcctttcctgagcccaaatcaatagaaaaactcagtcaatataatagcctatattaggcataagtaaataatttctctgttttaaattacaacaggagaaaagggtgctttcactcaaaaataataagttgtgtaagcatattcaaccaatatggtaccctggaaagtccatgcaaatgaatctggacacctaatattgattgagctatgaagcagtttgggagcattataatttgctaaattttatctttactgtgttgtttgcttatcctcaggtacctttgatatttgcggcagactggggagccaatgtttaaaatcagctcaacagccattgtggcgtgactctcttgtctttctggtagacagactccctggttatccctctgtcaaccctgtaccatgtgctaataagaacatttccagcagcactggttctgctttcttacagatgtcttgagctggaatgaagtagaacgagccttcaaggtgtttacttttgagagcctgaagctctctgaggttgatgaaaaagggaaactgaaaccttctgggatgatgtgtgggtcagattctgaaatgttcaacataccgtgggacaaccctgccagatttgctaaacagataaggcagcaatatgtcatgaaaatgaatactcaagaggccaagcagaaagcaggtacactgcatggagggaatggaaagcattcttgtattttatgatcgtcaatttttctcatattgtatctcatggatgttccttacactgaatagatattaaaatcaaagacagaacactatttgtggatcagaatttgtcaatgtctgtgcaagataatgaaagcaaccgagaaccttcagatcctagtcagtgtgatgctaacaatatgaagcattctgacttgaataatctcaaactctcagtccctgataatagacagctgttagagcaggagagcatcatgaaggctcagccccaacatgagtctctgggtaagttaaagtgtgtgtgtgtgtgtgtgtgtgtgtgtgtgtgtaagacactattatagtacacataaatcaaaaaatgtttaagatgcattatttgaatttaagttatttggttaattaaactttcttactgagtattgttgttccataagttctctttatttcaacccttgtttttaaaaatatcttaattcctcttagtccacacttaaccttagtaaatttagcacagcaaacatcattaaaactttcatcattagtgttacacagttattgtgattgtgtgctaaaaattataaacattcatctgcaaaacagaatgaaatgtccagtacagagcttggttcaaaatcaatgctcagtgaacatcatttcccctcctctcccacttatggctcaggctattactgtcattgtagactagcattaaaaacagtgctatattagtgctatatgaggaggtgcaaaagaaggatattggtctaaatttatactgagctaccttacacatcactgtcagattaatctgtgtaaaatatagctattttgtttctctacttacagctttcaaaggcttcctactatctgcaaaatagaacacaattccttggcctacttctccagtagtatcaaattacttttcccaaaacctttttccatctttttgctgttgctcacacactctgtgttctagcccaacagaattaggcctatttactctgcacagcctgctcttttcaatctctgtggtacctttccctcacaatatatcctccaccctgagttctctttttgactatgactaggattcagtggcacctccatgaagtcttattggatgtgtccatatggaaatgcctctcttagcattccagggtcataattaagctacacttctggtgaagtgctgtggctcactcctataaacccagcactttgggaggccaaggcaggaggattgcttgaggccaggagttcaagaccagcctgggcaaaatagcaagacctcacctctataaagaaaaataaaaaaattaatctacactctcgttatggcattagttattttctttcaattttataattatgtatatgcctatattaaggcctccattataccatagcgtcttagtgattataggtttattttaacatattaaacaacacctaaatttaacacctaggtcaaacattaaacaacaccaaatttaacatattaaacaacaccaaatttaacacctaggtcaaggaaaaattacaatagaaattgggaaatatttcaaaccaaatgataatgaaaaactgagtatcaaaactatagaatgcagctaatgcaagaggtactccaaaagaagtttatagctttaaataaatatttttctaaaagaagctaaagattaattaactaaacatcaaccttaagttagataaagacaaacaaaataaatcaaaataaagtggaagaaggaaaacaacaaaaaatattaaatcaaggaaatagaaaacatagatgaaaattacgtcaatgaaatagaaaacatagaaacataggaagaacaaaaatgcaaaaacttggttctttgaatagactaacaatattgataaatcttttatataaggttaatcataaaaacccatgaataactctatcgagaataaaactatatcaggaataaaaatcatataaggaataaagaaacagagacttccctcagattctacagaaatttaaaagattgcaagataatataaacaactttgactaaatgtgaaagtaaaatgggctgttactggaaaagaataacttaccaataatgacccaagaagaaatagaaaacctgagtagtcttatatccaattaattatatcagtaatcaaaaatcttcccaaatagggcacacttagcctgaatgatctcattggtaactgataccaaacactaagaaagaaataattctaatcttaacaaaaattattccagaaaatagaaaagtagcatatcctcctctattcattttatgaagctagcataaactttataagaatactgacaaggatagtggtacaactgaaagttaaagtaattcattaaattaaactcattcacgaacatagatgcaaaaattctaaataaaacataggaaaactgatctaacatatactaaatgataatcatatatcacaaacaggttgcatttataacagggatagaaggaaaatatatacattgtaaaatcaatataacatcaattaacacattagtgagaaaagtcatataatctcaatagagcagaaatagcatgtataactctgtagcaatttatgaaacaaatcttattaaactagcaagagaagaaacactactcaatcatataaatgttatttttcatattactacaacaaaccttatatatcaaggtgaaaagttgaaataattccctttgagatcaggagaatatccactataaacacttgtattcaatattgcatcagaggtgtatgccaacaagcaagactttttctcttttagataaaagcataaggtttgaaaaggaagaaataaaaccatcattatttgtaaatactgtgtatgtagaaaactcagaacaatacacaaaaaaattagaattaatatgaaagtttaataaggaggctgtgcttgttaaatgatacacataagatgtctggagtgctgagactttactgttataattattcattgtattaaacatttgtgtttcatgcacttttctttgtgtgttatatttcataattttaaaaacatttaaaaaataagtggttatgggccaaaattggataaaaaaagaaaaaataaattttaagaaagtgataacatgagagaataagtgttaagttagtattgactaatggtcatcttacccttttcattaatctagaggtgggtcgaaaaggaagtaatcaatggaataggattggtagaggaggcaattggagtgaatggaagagggaagaaaataacatttatttaatattgctctgctatatctcaagtacattaactaatacttacataaacatcagcctatgacaaagatactattatcccaatatcccaattctacagatgaggaaaccaagacttagaaagtttaaataatttgttcaactacatacaagtaggaagtcaggatttgaacagagggctaacttcaaaccagtgcttcctccactgtgtcttgcagcttcctgagttccagaaattcctggtgatgcagctaatgatttagccatgctcctagtctcattcatggtgatttttatgctgattttgttgcctttgggatttccttccttctaactagggtagattccctatttctttgtcctaagtacccttacctattagcctacctctcaaaaaatttaagccaataaattaacctgagttcttatggcgatagtgtatcctatgggactacaaatgaatgacagggaagtcactctgggttaatatagagtcagaataagccaggagaggtgtaaggcccaaggtgttttctttgttttgtttcatttttttttctttaaagcagctggatagttttccttaggcaacttttgccacctggtggtcaaactacataaattggtgtgctggattctggaataaagtagattattatatgaatagtaacttcctaaattctcagggttgaaaatgctatagtggacagtgtatcctagaggccacgcaatctggagggtggatctcagggccataagtgtttctccgtggtgcattttgacctacttccaggagccattccatttgaaagggggagggcatctgggcttggtgtcacattgtagctgttgtgagtatgggactttgttgttgttgatgttgttgattttacatttctttccctaactctgaatcatacttacttcaaagccgccaactttaattctctttaaacaaggcaaaaatcattcatgtatttcctgcacaaccattttagcatcaaatacatataaaagccttttcctggacataaagggctgaatatttgtgcttttcttaaccaaatactggatttccatctgagactatttttgaacttgacagggcctagtggatatttatgaaaaacctgagagttgataaccgcgaggtttagatgtgccctttatgcttgttgggtgtttttttaataaagtaactgctttgcagagggatcttgttatctctaaagtaaaacagattaggaaagctgtttttcaaagggatgagaaagcatccatttccagatgtgtcaaaaactactgaatcacactgtcaaaggattatgtggttgaaagcaaaaatcagaaaaagaaaaaaaaatgatttttactctactattaaataaataattcagattacttttagaatgttctttcctttgacaaaataactgatgcataatttttagaacatattttctaaactggagactttttctgctggatccttaaacataggagggaatatcaaatctcccggaaatctggcagaccacagaatagaataatttttatccacagatttcatatcaattgcttcaaggacacatgagacatcatggtctatttagagttatagttggcctgagttttctcttcagtggatgtatttatataaatgctgaactgaattggctgtatggttttcccctaaatcaaaatggaacgttcatgctgtcaccttcaccagcccaaggcaagatggaactagtagcaaaaatgtaagtagctgtgctcctgaaagaaagaaaaacactggcctgtccttcataggcacaatcagcttctccctctagaagcccaaatatggtactctttgccacagaataaaaagttgtcttatgcttgccacagaataaggctttgttgtaggttttttcccacatttctaatttctctatatggctctaggttaatttccacgtttaatatatgatgtagattcttctcattcaatcaaaaggaaatatttactgagttcctgccagatgctgggtgctcagagtacagttaaaaataataataataataagatgaagtttctattctccaggaatttacatatgaggtggagagacagaccataaacaagtaagtagcattaggcatagatacatgctatgataaaaaaaacaaacaaagcagaggatgaggcagaagactcttgagaaggtgatactcgaccaatatgaatgaagtcagggtctgaaaaaggtgaacagctaagggcaaagcataccagagagaaagaaagtgcaagaccctcaagacacagcaagcaggccagtgtatctggagtagaatgagcaagggagagtcaaagagttgtgcttaaagagttaggccagagccatttcctgtacaactttgtcagacataatcttcatttattctaagagtgataagaagtcagggctgttcagttgttcagcagcatcaaagtatattcccacaaaatccacctcccacacacacatactctatttctgtgatcaaatttgcaaaatgctatatacattatccatttctcaattagagattcacaataacaagagcaaattacaaattctaagacattcatagtgagatgttcgttgatctatgttaaacttatttatcatggaactctttcttctggtgatgcagaaatcaacaatatgaatgtgttccttccctgttcattcacatggctgtttgcttcatagccaaggatgatatcaccatcccaatcatcatataagtatactctgtcattactaggaaagctagtgtgcatgactcatattggtccatagtgtgcatgactcgtattggtccatggagtccaggtaccgcttcatttatttatttaacttttgttaagcttcatttgtaaattagcagatgctcattaaataatttttaagttaataaatgattaatgaatggaagggaagctctgcagaatggtgaaagcgtatcattttccaataggaagtgcacttatctgccagtgcctctttgcacgcatggcctgcccccaccctagtctgtcatccacaagataagatccacagaaatttaaaaaggctttgtgatagtcaccagcacaagaagacaaatcatgtgtactaagaagttgatttaatcagtaaataattacaacttttaaagataaaggtatattgttagaagtgaatgatacagtctgaaagcagaatatctggtatgatttaagatatatcacacaagaagctaggttcttttcaaagagcttagtataatttttctaggtaggcacagatttagaattatggacacaaacacctttctggaggcacaaaacatgcctttcaggcattgccttttcagcacagaaacatagatcatatgggcaacaaaaaagcacagcattaaccagcagggcaagaacaaagccagaacacaactggatgttggtgtctttgatttgcagagcagaccacaaacaatgagatcaaagatgatgcagtcacaaaggctgattctcatgaaaaggtaaggaattatttttctgaaaatgtagatgacaagatgatctgagaaaaaccatgacttggagtaagaaacactgaaaaagaaaaaagaagatacttagaaggagaatactgaggctagaaaagaggaactattcggacatccccagagcagctccaactggacagaaaggagttaatattgctaggcggcttgcgcataacttcccagctccttgctcctctctagacagtgtggcttggcaacctcacaaacacctgctcaccatacagccctgtagagctaacgttgtcttgaagagagttcagaaaacctgcctgtaattgctaacaggactcagaagagtataacctaacaataaaaatatttagattatgttgcccataaaaaaaaaagtcaaaggcatactctttttggcagcagctctcctaaaatgttgccatatggatttatacatatgcagatttccccaattagatggagtacatactggttagttgacggagcccaagagggctccatttggacttaaacaaattaaagctgaaattgtgttcctatgatattttagaaacccaagaagatgatggtggaagcagatttagaggacataaagaaaacacagcagcgcagtctaatggactggagttttactgaacattttaaaccgaaagtactgcttcaggtatttatggactgtgattctctaggagacggtcagataggtctggagagtctgctgtgatttagaacagttcacctccaggtcattctctcagatctagttcagatcaatagtctcctttacttcagctataaaataaatttactcccagcttgagctatgcattcccagcgactctctaaaatagtttaaaatatactttatgaaagaatgcttttataaaatattttaagaaaaaaagaaatatacaagactgctgcatatatatatttttttgctgctgcatgtattttctaaaaacaaagtaaggttttattgggaaaaaccttatttttttccatattgtttatccattctactcaatttcaccacatttcacagtattttctgttttgattaacagttcaatggaatctgtggtagccaacattcattgagcacttaccatgtgccaggcactgattaatatgtattattagctcatttaatcctcacaataaccctgtgaagtagaaactatgtaagcagtaagaaactgaggcaccttgaccagtagtgacttttgtccaaggtaacatggcagctaagtgagaagctagatataaacccaggaaatctggccctggaacttgtactcttaaccactcagcaaaataacaagtaatcccaaacctaaatccttttgttgtgtttagcttttacacaaaaacttgtcctcttttggttttgtctttttaatttgatttttatttttatcaaagttttacaacgttttttaagccagaaagttctacaaagtcttactatgaaaaatagcagcctccttcccccatccccaccccactccaccaagccgcagttctcagaggcaaaaatcttcagtgcatttacccctttcttttgttactttactcggtgatctctaaatagcaagtatattttgtttagttttagttttgtgacatcattaccaattgattcgctcttgagaacacagctttgcccacccccatccaacacacatgtgcatgtacaggtacaggctcacccacccccacattcacattagcacttctccattctctgatactgttaacaatatcgtaatttttggttagataagtattcagaactcactttatttcagttatgtaagtgctattcacagctgaactgtgtggtattctataattacatttcctgtatgggtaccatttttattttctctgcagttaataattgcctctttttctatttgtttagtttactatgtatttattattaacttatccccaaattctctactactgagtaagtcactcaatacattcaaacataacagatattctattagttttattgtattagtgatatctctcccatattccctaagcttgctgcacagctgtggtcctgggcctccctttaccgtcatccgggccacacccattcccttcctttccagttagatacctgttgccttcatcccatgtgttccctctccggttactctcttttttgtagagaatcatctcttccagtagcttccttaattaagatagacgggaagtaaatttttgaggcattcaatatttgaaaacagcttaattctatctttatattgactgacagttgggctttatagtaaatgctaaattaaaaagcattttttctcaatactttaaagacagtttttgacagtgttctgacttcccagattgtccttagaaaaataaataaatacaattctgattcctaatcagttgtttgagtatgttgtgatcctctccctggaagattttaagatcttctctttgttccaatgctcttgatttcctgttgatatgcctttgtgtggttctgtttctatgtattgttctggcaagccggtgcaatccagaaattcctgtatttatattttgggaaattttctataatcatttctttgataatctctcctctccattttctctgtccttttttttctggaaatcttattactctggtgttggacctgctagactgaacctgcaatttccctttcttttttcttttagtttccatcaatttatcttttggctttgctcaatttccattcatttcttatattgagccctttattcctgttattatcattctgatttcctaaagttatatttataatttcaaattacctttttaaagaatcatttcactttttcttttttttgagatgatgtctcgctgtgtcgcccagcctggagtggcatgatcttggctcactgcaacctctgccttccaggttcaagtgattctcctgcctcaacctcccaagtagctgggattacaggcacttgccaccacacctggctgatgtttgtatttatagtagagatggggtttcaccatgttggccaggctggtcttgacctcctgacctcaggtgatccacccgccttggcctcccaaagtgccggcattacaggtgtgagccactgcatttctgatataataccttctcttatctctatgaggatattaaagtcctctgaagttgtcttctccatgaattatctctttttcctccaagtttcttttctcattttttgtcttttttgtttcgtcttcatttttcacattggagggtaatatataatattgtcctctttgctcatattaataatgaaacaataaaaatatgataggaagtgctatatgaggtggggtggggggttgtcaataactgagttcattgttgggtgatttgactgggagatttccataggagactcaccattgttggtatgtcagttctgttttcttgggccatttaaattctccatgaaaaaaaaaaagtctaattttctgtctgaaagacataagccttcctgtcagtgttttgagagctaggtaatgagggaagggtattaagcttctgacatttattatctagatctgcattatccagtgtggtagccactagtcacatgtaacttctgaatacttgaaatgaatctagaccaaattgagatgtgcaataactgtgctatacactatataagtgctattacacactcaatttccaagactttaaaaaggtggcattgattacttttacattgtttatatgttgaaatgataagaatttttatctatcaggttaaatataatatatcattaacatttattttacttgtttctttttactttttaaaatgtggctactataaaatttagaattgcacatgtggctcacatttgtggctcactttatatttctattgagcagtgctgatttaggcttttacacaattccctttttttctagaatgtacttctctgtcagtgtgcgttgggtccactgttcttagaacccattcatctaccatctgtagttaccctcttcccctctgctagagtgggagataggcaatagcccagttgctcagaattttaatggaatccaggggcctaactgcttcttaaaaagattttaaactaatcttcctattttcagtgccactttcaccccacttgcagaggtgactagtatttccatatcctgagactttctatatttctgcacacaaatggggttgcctgtggtctctcctaaaattaatcttaggacttggctttctgtattctgctaagtcatttagcatttatccttctgctttccagcttctaaaattccggtgcctttatctcctctccttcaacaagttgaagttggctttcaattttatgatattaaaaaaacaaacaaaatgttactgttcttttaatgaggcgttagagagtgcaaatgttcaatcttttctctgtaactgaaagtttacttcagactttatactatttcagtttttctcagtccttactgctccatgaagctgcacttttcaaggtaatcaataatctttgtcttgccaaatctaatggacacttatctttcttcatcttccctgacattttaacagcattgcagagcttatcccttcccccatgaaacactctgcactcttggtttcctcagtgttgtatttggaattttgttgacttttcctcctttacccagcatctaatatggaagtgcctcaaggctctggagcctccaggaagccctagagcatcttcttgcctctgtaaacacccttctttgatgatctcatctgttatatactatctaatgctgatgcccatatcttttaaattatctctctctagagattcacattattataccttactcaaaattctacctgaatttctgatcaaatttagtatccatctcaaatttagtatcctatatgacactcatatttttcccacctaagcatttcttcccttgtccatctcagaaaaggtcaccatcattcaagtgctcaagcaaaaagccagaatcatcctttgttccaacctctcctttatccctgatacctaatccatcatcagtgtttaaggggtatacctccaaatatatcttcaagctcttctgcaccacagctaccaccacttttttttttttttgagacggagtctcactctgtcgcttaggctggagtgcagtggcatgctctcggctcactgcaacctccgcctcctgggttgaagcaattatcctgcctcagcctcctgagtagctgggactataggcacgtgccaccatatctggctgattttttgtatttttagtagagacagggtttcaccatgttggtgaggatggtctcaatctcctgacctcatgatccacccaccttggactctcaaagtgctgggattacaggcgtgagccaccacacccggcctacttttatatgactaccaccctctaattccaccacaatatcctcctgattacctgcttccactcttgccctgctctaatccattctctatatatcagatattccattaatttcatcttttcggacacacctccttcaactccaaaataatctataaagccacaggtctgtagtcccaactattcaggaggctgagagaggaggatagcttgaggctaagctttaggggccagcctgggcaacatagcaaggtcccgtctctaattaacaacaacaaaaaaatctttatcatattttagaggaaaatcttatctattttgtttatttttgttttcctagtacctgcacagtgcctgccacacaataggtactcatttttaatgaaaaacttaactaaataactaacgtaaccaataatattaatacagaataaaagacaagcaccaattagtaaaaaaggggaaaataagatatgaaaactttacatattgattgagagcagctatagttctgtgaaacttagtgctgtatttttagcacccccaaagcaatatgaaaacccaaagatttcaaagctcttattatctaaaagaaaggatatatattcatcataaacgcaatggttttctgggtttatagtgtgagcagaatttgcttttcaaaaaaacatcagtaagtactagatgataccctacataacaatattttaaaatgcaaagatattcaccacatgtatgtttcttatgttggctctgaggaaacagatgtaaaagtgccactccataaagacactcattcaggggactaaattggggaagcaaatgtattgttttgattatgctaccaatgtagaattgaaagcaaaattaaagcagcccttttctaacattattatgttatatatatatatattatatatatatcactccatgccttcagatatgcaaacaatagaaaaccaaaagctgcctcagcaaattgatattgaaaacaaaaacgaaagcccacagctgtctaatttatttttcctattgacaatttccttattgttgattggcaaaggaaacaggataagcagctgcccactgtgtctctctactggtagctaccaccgcagtgcatgctgaggatggtatgttttagaaagggccagagttggaaggcaggtagaaacggtatgtgtcagaaagaccactcacttcacttcatctaacacagcatggtatagtggagagaatgcaaaatggtaaaatttagagttggaaaacagggatgagccctggcaccataacacacagtgttcttggacaagtcccttactctctcagcctcaatttatgctgaaaaaatgagaattctaatattttgatatgggaaaaataatcatacctactgatttagtccgcttgggctgccatgccaaaatgccatgcctgagtagcgtaaacaacagaaattttctcacagttctggaagctgcaagtctgatgtctgggtgctggcatggttgagttttgttgaggactcccttcctggcttgtgcctttgcgttgtgtcctcacatggcagagagagtaagagggagtggggatggagaagggaaagagggagggagagcaggttatctgctgcctcttcttataacggcactaatcttatcttgacggccctagtctcatgaccccatcaaacctaattactttcccaaagccccatctccaaataccatcacactagcagttaaggcttcaacatataaatagggatggtgaacacaatttaattcatagcatctatttatgtggagttttaaatgatgataaaattagatggtctatatcaaggcatggaaaatgctagataaatgactgctgtgcttaattattacctaccaaccttaatgaagaacacttgtagcaagcgccgctctgcctgatgcctagtatttgtttttctaaagtgttgctgaaatgcttcccaagctagctaccatttatgctctcaccttctagcagctaggaaagaaacctctgggaatttcaacttgactaacaatgtagaggtgaatgtaggaaaaaaagggagtagagaaatgccctagtaggagacccttctcttggggaaaataaaaaagattctacaatgcaattattttgattttcaggtccttcaagaagcccataagcaatataggtgtgttgattcttactaccacacccaagacaactctttacttttagtctttcacaatccaatgaatagacaacgtttgcattgtgaatattggaacattgctctccactccaatgttggattcaggtaacaaatttggaaagtttagttaattagttagttgggtttagttagcttgccagttacttagttacttaggtgttagttccttaccctaagctagggggttcagctcaatgaaaacatttgtgtagtactatagattcaattcagctcactaaattgaatgtcagcatgtgctgggcactgtatgggcattggagctataccactaaagaaaacaggtgtcattcttgccctcgtggaatctagtgaggatgttgttaaattacatttgattcatttagattccagtaaaactgtctccaaaagatttcaagtaggaactataaaacatgacattctgcatgttgggtttttttaactctattttatctggggaacattcaaaaataggtcagctgagtaatataccaacagagcagtcaggtttccagcaaactgagagcctaggggttagtgattttttctttccagctccttagttattccctttttctcttagaactttgttctctcttctcattaagtatgatgatatttcactgttatttcaatactggttaatgtattttcagtattatttgtatagcattttttttagttttaaagaatacagaaagatttacagaatggacttacataataattggggggaatatactgtatgtgggcacacacacattttaaagtcataaaatgactttaaaatgaaggaatttggtagatatactaatataacaccttgaccagttaagctgtgtttgtctttgttttgtttttcgttaacaataattacgcattttatccctttgccttatgtcttggctaggatctccaatttaattttgaggagaaatccttgtcttattccagattttaaaggcaatgtttcgaatattcaacaattaaatttttttttttgctctaggatttatgtaaatattccttattaagttaaaaaaactatttctagtttgctatgagttctcaatggtcattaagtcatatcaattaaatgatttttctggatcaatttaggtgtttatatttttttctttaatctatgaaagtgctaatttcattaacagatattctagtgttgaaccaaacttgcgttcctgtagtaagccagatttgtccattatgttatcttctttataattgccacatttgctttgctaatgtattgtttagaatagttacatgtgtattcatgggcaagattcagctataatttttccttgctttaaatattcctatttggttttagtattgagattatgttaacctcataaattaactggagaatgttctccctttttatttttattttttcattttctgaaatagtttgtggaaaattaaggtatatgttcctttggcatttggtagagcttgcagataaaaacatacggcccagggaagatgtttgattactgacacgacttctatcatggttattagactcttcatgttttctacttaattttaattaggtttataatttatatttttccagatatttgaccattacacctgttttcaaaagtattgacataaagttcattaaaatattcttttaccttttaaacctgtgttacgtgtgtctatattctttttcgttcttaacatttttaatctgtgatttctctatatttttctggatcaaacttgccaaaggtttgccagtcttactaatatttttaagaaatctgttcttgctttctaactctttctccttttatctcatttaattttgccagcatcttgtttatttctcctctttaatttccttggattattctgatgttctttaacttcttaaattaaaatcctatcttgtgattttgagttgttttttgttagtttttgttggctttttccttattagcatttaaggccaaatccctccctaaataccgccttagcaacacctcaaagtatctgactgatagtatttttattatctttctttttttattttattttattttatttttaattttattattattatactttaagttttagggtacatgggcacaatgtgcaggtttgttacatatgtatacatgtgccatgttggtgtgctgcacccattaactcgtcatttagcattaggtatatctcctaatgctatccctcccccctccccccaccccacaacaggccccaaagtgtgatgttccccttcctgtgtccatgtgttctcattgttcaattccgacctatgagtgagaacatgcggtgtttggttctttgtccttgtgatagtttgctgagaatgatggtttccagtttcatccatgtccctacaaaggacatgaactcttcattttttatggctgcatagtattccatggtgtatatgtgccacattttcttaatccagtctatcgttgttggacatttgggttggttccaagtctttgctattgtgaatagtgccgcaataaacatacgtgtgcatgtgtctttatggcagcatgatttataatcctttgtgtatatactcaataatgggatggctgggtcaaatggtatttctagttctagatccctgaggaatcgccacactgacttccacaatggttgaactagtttacagttccagcaacagtgtaaaagtgttcctatttctccacatcctctccagcacctgttgtttcctgactttttaatgatggccattctaactggtgtgagatggtatctcattgtggttttgatttgcatttctctgatgaccagtgatgatgagtattttttcatgtgttttttggctgcataaatgtcttcttttgagaagtgtctgttcatatccttcgcccactttttgatggggttgtttgtttttttcttgtaaattcgttttaattcattgtagattctggatattagccctttgtcagatgagtagattgcaaaaattttctcccattttgtaggttgcc

SEQ ID NO: 812 - DNA, 2217 bp, Homo sapiens
attaatgaaataaatacacttgttggatctgcttcatctaaaaaggcaaaaaaacctgtaggtggtaatgctcctttatattatgaggtgttaacggcagcaaaagcaattatggatagtggagagaaattaaccttaccactgatagggaaactcttgaaatttcaacttctccagattaaatttaaggaccaacagcgacgggaaaatgaaaagaaggtaatagaagacaaacctaagttagaaaaggataaagggaaagcaaaatctcccaaggagaaaaaggctccaagtgccaagcctgccaaaggaaagggaaaggatcagcctgaggcaaatgcaccagtgaaaaagaccacccagttaaagcggagaggagaagacgaccacaccaatcgttacattgacgatgagccagatgatggtgcccaacattacattatagttgtgggctttaacaatcctcagctattagcaattatggctgagcttggcattcctataaccagcgtgattaaaatatcttcagagaattatgaacctctgcagacacacctggcagcagttaaccagcagcaggaagttcttcttcagtcagaagatctagaagcagaaaaattgaagaaagaaaatgccataaaagagcttaaaactttctggaagtacttggaaccagtcctgaataatgagaaacctgaaacaaatctctttgatgttgctcgacttgagtacatggtcaaagcagctgattttccttctgactggtcagatggtgagatgatgctgaaattgggcactgatatttttgaaaatattgcctgcttgatgtatgacatcctggattggaaaaggcagcaccagcactatttggaaagcatgcagcttattaatgttccacaagtggttaatgagaaacctgtattagaagccatgccaacttcagaggctccacaacctgctgtaccagctcctggaaagaagaaagcacagtatgaagaaccgcaagctccaccaccagtgacttcagtcatcacaactgaagtagacatgagatattacaattatttgctgaatccaattcgagaggaattcatttctgtgcccctgatactgcattgtatgctggaacaggttgttgcaactgaagaagatctcgtcccacccagtctgcgggagccatcccccagagcagacgggctagaccacagaatcgcagctcacattgtgtcccttctgccctcactctgtctctcagagagggagaaaaagaatcttcatgacatatttttatctgaagaagaaaatgaaagcaaagcagtgcccaaaggccccctcctactgaactatcatgatgcacacgcccacaagaagtacgcactacaggaccaaaagaattttgatccagttcaaattgagcaggagatgcagtccaagttgccactgtgggaatttcttcaattccctctacccccaccatggaacaacactaaacgtctagctacaattcatgagcttatgcacttttgtacgagtgatgtcttgagctggaatgaagtagaacgagccttcaaggtgtttacttttgagagcctgaagctctctgaggttgatgaaaaagggaaactgaaaccttctgggatgatgtgtgggtcagattctgaaatgttcaacataccgtgggacaaccctgccagatttgctaaacagataaggcagcaatatgtcatgaaaatgaatactcaagaggccaagcagaaagcagatattaaaatcaaagacagaacactatttgtggatcagaatttgtcaatgtctgtgcaagataatgaaagcaaccgagaaccttcagatcctagtcagtgtgatgctaacaatatgaagcattctgacttgaataatctcaaactctcagtccctgataatagacagctgttagagcaggagagcatcatgaaggctcagccccaacatgagtctctggagcagaccacaaacaatgagatcaaagatgatgcagtcacaaaggctgattctcatgaaaagaaacccaagaagatgatggtggaagcagatttagaggacataaagaaaacacagcagcgcagtctaatggactggagttttactgaacattttaaaccgaaagtactgcttcaggtatttatggactgtgattctctaggagacggtcagataggtctggagagtctgctgtga

SEQ ID NO: 813 - protein, 736 aa, Homo sapiens
INEINTLVGSASSKKAKKPVGGNAPLYYEVLTAAKAIMDSGEKLTLPLIGKLLKFQLLQIKFKDQQRRENEKKVIEDKPKLEKDKGKAKSPKEKKAPSAKPAKGKGKDQPEANAPVKKTTQLKRRGEDDHTNRYIDDEPDDGAQHYIIVVGFNNPQLLAIMAELGIPITSVIKISSENYEPLQTHLAAVNQQQEVLLQSEDLEAEKLKKENAIKELKTFWKYLEPVLNNEKPETNLFDVARLEYMVKAADFPSDWSDGEMMLKLGTDIFENIACLMYDILDWKRQHQHYLESMQLINVPQVVNEKPVLEAMPTSEAPQPAVPAPGKKKAQYEEPQAPPPVTSVITTEVDMRYYNYLLNPIREEFISVPLILHCMLEQVVATEEDLVPPSLREPSPRADGLDHRIAAHIVSLLPSLCLSEKKNLHDIFLSEEENESKAVPKGPLLLNYHDAHAHKKYALQDQKNFDPVQIEQEMQSKLPLWEFLQFPLPPPWNNTKRLATIHELMHFCTSDVLSWNEVERAFKVFTFESLKLSEVDEKGKLKPSGMMCGSDSEMFNIPWDNPARFAKQIRQQYVMKMNTQEAKQKADIKIKDRTLFVDQNLSMSVQDNESNREPSDPSQCDANNMKHSDLNNLKLSVPDNRQLLEQESIMKAQPQHESLEQTTNNEIKDDAVTKADSHEKKPKKMMVEADLEDIKKTQQRSLMDWSFTEHFKPKVLLQVFMDCDSLGDGQIGLESLL

SEQ ID NO: 814 - DNA, 73148 bp, Mus musculus
  misc_feature (1)...(73148): n = A,T,C or G
tgtatgaattttcccccactatattctttgaagggtatatgtgtttttcttttaacatcaagtatataatcctctgcaggtcatgaataaatgtctgggtctttaatattagttttgaaattatgtaaaaatatcctgtctctcagtaaaaaaagaaatctggatcactgtagaccagaaaatattccagaatagacaacagttttagcattttccctactttctggcttgtgctatgggctaactttttgacttttgaatctttccttcattttcttgccaaagaaaagatgtgtgtacaggtttacctcataatttgggagatgtgtaagaacagtacttctgacatgaaactctctggactgtgtctgacaaaatattctgattatattttacaaactttttttttgttatcttaacaagcaggtaagatcagcattatcattataacctgttcccctgttaaagaccagaaatggcggcataaaaaggtggagtaatatgcccaaggctggggtcaatacacggtgggtgtttgaatatgagaacagcagcgtcggtatatgtatgcagcatgccaatcggtcatgtccatttctgctctgtacccagctctcttccagtttgcttaaaatcagagtaaggaatctgggagtcctaggttaggcctacagtcccagaggcaagagaattgggaatttgaatccagcctgggctactcattatgtaacctgagcctcgctgtgactctttgcctcaacacccccagacaataaaacaaacagttcagaatgggaacagaacccagagccctgtgaaggctctactgccaaactgtaaccccagcccagccatggaagccagtgctagctgtgtgtcctccttgtggccctcctctcagccttagttctcttaagttattcacagttccaacttcatctcaccagcccagtggtagccctgagaacgacagcgtcagtctaagaccagtaccagagagagtataatgaatgctattgtttgcccttcctcctttggccagtcttgcgactctggtaactccctacagaatcagctcaaatggctccgtttatcttaccttgcctttctcacgcctgaagccaccgccaagggtcatttattgaaaccagcaaatgttgtaacctttgaggcaatggatgacagtcggggaagccagaatatttaaccaaatacctcaggaagaaaagagggggtgagatgctctggagtgtaagagtagaacaggaagtgaaggtagtgttgtaactgcctggctgggagctgaaggcatgcctcagtaaagacatggaagtcctctgaacagactgagagagagtcttttattcagggtgtttatagaaatctttgtccaaccataacctgaccactaaattattaaacacagacattagtgtttgcacataacaaaagaaagttagctcacagaagtcagtaagggaacatgcgacaggtgtggtgtagccataagtcgggatctgtaggtcagggcaatctgaaatccagaacctttacatactgggcaagaactctgtcactgagctacaggtccagctttcctgactctaccttttccagacagtttcactaactatcccatgctggcccagaattcactctgtagtcaaggcaggcctggctttgattttaattttggtggcacaggcctataatcccattgctcaagaggctgagacttgaggatctgaactgcaaagctactgtgggctacgtagtgacagtgtctgaagacaagaaaaagggaggggacacgtcggaatgaatatatcaacacaaggattctgacacaggcagttcagagaatcaccttctgtttgattaagttcagaaagggggtcttgacttttgagggcaaatggcaaattgactttgagcgtggcaggttcaaattgaagactgtgtttggctgataattatgatctctggtagatgcctcatgagaattcagggctagacctagaatttggacttcccactctcctcaaggctgtgcctaatctttaaatgagacggaaccacttttcgtttccctaaagcaccgagacatcaggacatggtgtctgggagtttgaggcagaagacagatgcggcccaattatgtttgtttcaacacgatgcctgcgcttgcagagtggaaggtggataggaaaggggtttattaagaccagatagtgggatgtggttgctgtttctgtgttttgccttttggcagtggctctcctttaaaaaacaaaaaatagtaacaacaacaacaacagcaacagaaaaactcactcagtttttcttttagataactttcccctgcctctgattttagggtttattaaaaaaaaaaaaaaaaacaacctatttttgagttcccatgagatcacagtatcagttcactctttctggtccatgggtgaaaatgcccatacaaaccgtgtttcatggttggatcaaagaactctcccctctgctgtgtctacaagtagactttggtgtcagtgtctcatcaccttccaaattatagctttcatgtctgcagtgagggagtaggcagacatgcagtaacacagccaggcacctgcacctcagcaggactggctgtgttcatactagaacaaatttccaccagaattatgcatttgtttgagacagtctcactacacaacccaagctagccttgaacttttgacaatcctcctgcctcagccttctaagcgctgggatggcaggcctgagctggcacccttacccatgaagttttacagtgagatgcacagcaaactgccagtagcaagttgctaagactggatacagttgtatccatgcatgtctggttagctctcagcataatgtttagactttgtccccagcggatcatgttctcagagatgctaaaaaccacgagaaaaagattgtttattcattttttatatatggttatggaaaaatatacacaacaatttttaaatctaattgtaattttgctactttatgaaccatagtgtagttttctgaaacacaggatagctgatataaaacccctatgaaagggtcgttcaaccctcccaaagaggttgagaatcactggtctagaagtaagcacgtgttcaatattattaagttttatatgtcagagcaaaactcctaccacagaataaaaggcacacacatggctgtgccacatccaaccaaatgtccaactcttacagaactctggtgtccttccccccaaacaactctctcttcctcagccattatcttcccctcaggacacctgctccatggtccatctaggaaatggaggcattgccagcttcctgtttccacccctcagccagtgcagcctcccacacacatggaaaagaacacttcttaaattctttgggctgtccccaagttaagcagccccaagcaactcagtactcttgtctaaaagaaggagagctggtggacagatggatgttcctattgacagacacctcccaaggttccccatcttactctcctttccagatgttccttaggaaagcagtggatatttttaaatctctttccgttttgactcatcctgtttctcatcctccacatacagtcggggtctttgtccatttgttttgatatacagtctttctgaatagcctaagctggtctcaaacccaaaatctttctgcctccgcctccccagtgttcgcgttataggcatgaaccaccacacccaaaccatggccagctttatggcagtcacttagcttctttagttgttgtttctttggctttggtgacaccattctctacaggagtctttcagcttcaggctcttttatgggtgctttctcccctgcctgcgttgggctccccagggtctgcctttacctactgttttcctctctttttcctgtgtatctcttccgttcttatgatagtggccattgcatatgtgcctgtgagtgctttccaaaccggcatgcatctgcgttcagatgcctcccacttggcctgccaggggttgccccctcagtgaatgcattgcttcttcccatccagccttcaaatcatctgctgatttggtttctctcttcactggatgtgtcaggcttcgggggttctcactcacaggggagctcagagtccatatatggatggacctcaagctcatcactttcctgcctcaagtcctccagcactctcagaaacgattaatcaatccaattacagttcatatcctcacgaaaatacccgacagcagcaagtccttcttcccccacagctttaccttctatggcagaagtctgcgagctgtgcctcctgggccagatctggcttgcttcccgtttttgaaaataaagttgtattggaacatggccatgtccgtccacatacatattgtctatggctgtttctgtgctacaatcatagtggtgagtagttgccacagagaccatctggccgacaagatctcacatgcttacggtctgtctcattttcagagctcattttccctcaaggttcctggatgcctagcagatgtcaaagttccctctcagggttatagcgaagaaccaaaatgtcttgaaatttgatattgtaggacttagaggtgtgttgtcattgtctggtgccggaatgtgaggttgcaggacaaggagtccagaagaggggatgagtgtaaagtgggcaagggtaaccaaaccactacctagaacccacaaaactgtcagtacctcactgtgctcagctatgctggggtggtatccccagggactaagtgcttgcccagttctgatgttgggaaaccccaggaagctctctacggaggtgggtcagctatagactgtggcctatacatgccaaggggcagagctagcaactagtgacagtggatattggcaataaaatgcaggtcctttgtaagagtagctcttatgagctgtccctccagtctgtaccatgatctcaaatccatttgaattcctattttcaattattctggttttatttccaggaatagaattgttggagcctacagcaattctattcttgatacttcaaagtgcctctataggttcttggtgtctaaagcaagttatgcagcctcaccaactgtgcacacagcgtctactttctctgtgtctcatttgtaaagaatcaagatatacaagcaaaggaaggaatatttgccaactcagtctcgggaagcagagacagggcacaatggcatccacttgactgtccactcttttcctttttattctgtctgaggcccctgccccatcgtgggatggttccacttgctgtcaggatgagtcttcccccactaccccccagtcaatcctctctgaaaatacccttctagacacagccagaggtttacctcaccagtctcctaggtgactctaaatacagttgagttgacagtgaagattaatcattaccttccacataattaccagcctgtattacaagatttagtggcaaatgccctcttgctgtcccttatttctttgatttatatagcaggttttactctgtgggtctgctctgtatttcctttagactgatggtattgagcatctattcgatacatattttttttcattcttatttgttaaaattgtgtgtctgtgtttgatgtgtgtggcggggacagtgggcacacacataccacagtgcaggtgtagaggtcaaaagacaacgctgaagaatccgtttcctatttccgcgtcctgcttccggggattgaactcacaggcatcacacagtaagtgcttttgcccactgagacacttttcccagccccaaatgtaaattttctttggagaaatgtctgtttcagtcctctacccatttcccaatcagatccgttgttgtagagttgttggtgggtgttttttttttggggggtggtggtagtggtggtggtgaggatattagcccttgactaagcagatgatctgcagagagtttctcctagtctctagattgcttctttcccttgtttgctagtgtccttttgtacatgggtgctcataagttgaagtgtgccacttatctattttttgttttgttgtgtacgttgtatgtgtcatataaaaaaaaaatcactgaatgcccagccgatgcttcctcttctcatgtaagggatttaaagttttaatgctcctatttcagattttaatccatgcacattaacctttgctgagattactcagtgttctaaggtcgttggaaattgtcccccctgcttcctttcaatgtccttggtgccgtcattgaaaataatttggccatgtacatgatggtttgtttctggcctctcccttgtatccccatcagtccgtaggtctgtcttgatgccagtacctcactgttcagatggctacggctttgcagcaacatctgacaatcaggaactgcgaaacctgaaagtttctttccctttcacggactattttgactatcagggttaccatttatatggggttgtgtttctagcttttgaaaattaagtgaatattaattttattggtaacaaactactaaaagacacatttaataggaagctagccaaatgactccctatgttaccaaatcatggcttttttttttttttttttttttgccaagtccctactttgtaccagattaatctccaccccctttcaggtaattcaggttctccatatctaacttctgcagtgttcttcttccctgatatacccctttcttttctcttcctgacctttgctctctaacttctccactaatgcctgaccacttctgtcaggatagtatcccggctacctctccacacctccctgggcctttgcccctgttctcactgctgggactacttcccatcgttttccaggcctcacagtctccttggctcttccagtaggagttaggttacgtgtcattttctcccagcagccttagtttctgaaaagatcgtgtcttctcatttctgtagcccccaccctgtgctgtgtggataataaatattatgtggtaatcttcagtagctcttcaaaggcaggagctgggttttcatgtccctccccctgcccctgcgcctcccccccccaccccgtgtataaacacaattgatgttacacaaataaattctgttaaactcaacagaactaaaagatgttggagtcacccaggcagaggcctgccactgggtgtagatatcactgctatgggcaaaaggaagaacagtgggagaggccccatggtgctctggggggccaggcacattgggactcagaatgtatgaacacttgctacagaacagcactgtcagctgacttctacagagctggcttggaaagttcccttcttgtcaggtcaccacacagaacttgtattcagaaaaacctatgtaaagttcaaggccctcgaaaggccactgggcaacagtccaattcttctgtagctcagtagccttttcctggaggaatgccaggggccctgacgaccttttcattctccagggcatttagattggagacatggttttggacaattctaatttcttgagactgtagatactgtggttgtcacacagatgaaatggccttaaaaccgatgcagacccaatgggcttggttcccggggcatccaaggagaaaaacatacatgtaggacatattgtgtggtggcaagtgtctagcccaaagatgaggggagtaggttggctcagcagccaggatgaaagagagacatgcttatgaggaaatttcctcagaccctactgggatctatcagtcacagactaacaaggggtgtatggaaagaaggtggtaataccaaagcttccaaaggcacacaggccattcgtgatgactttgccaggccaccaccccctcccacatatggtgaatgagagcaagaatgattatgtttttcagcgaagttgtatcatctgtacacatggtaggcctgtggggggttggggtgggggttggttttcagctgaggactgacctcaagtctatgtattctagacaagagttcttggatatatttaaaggcaaaaagtgcatgcatatatatatatatacatatatatatatacatgtgtgtgtatacatagatatacatatacatatacatatacatacacatacacatacacatacacatacacatacacatacacatatacatcatatacatatacatatacatatacatatacatatacatatacatatacatatacatatatatatgaaaaggacaggagagttatgaatctcatgatgaccttcaatgttctctttagccaaggattgtgggtccgtgattcacccactgttggagttgaggtgttgggcacagctgctgaggaggcaacatgtggggagtgtttaactgtctccctgtgtcaccactatccagtgctgagctttagggaagcatccaaacactgctcagggggtgggaagacatagtctaagatggagggggccaaagttggggttccctgactcttgggcacccagtcagcactggggtgttgcacagaagagtcagaaacgaaggatgggagtccatggccccaagatgagggcatggaggcccgtgtgctgaggatgaattcgatgatgaacctaggcaggggaaatgggcgactcaggtttagctcatcagtgaaggtagcaatggttgtctggaagcacagagaggccttctacgggagacttaggctgcagctctgtaggtgaaggccttctccatgctcctgctcctatggtttcaatggaagagacagtccatgtttatccatactatgtattgactgttcatcatgggagatggatgtgtatcaacttctcaaggtgggccagagattaagtttcttttgcaggaggaatgtccaggaaggagagcttattggctaaaccctcggggcctcaaggtatctcattagcacggtgaactctgttttgggctacttgaccagcatggggagtgtgggcacgtgttccagggtaggaatctggcagggagcagggaggtgcctaccatctctggtgtgtacccaagtgctagactctcagacctgctctgtcttaccaagcttcctagcatggtccactgtcccacgaaggatgaccttgaacttttgttcttccttcttctacctcctaagcattgcaatcataggctgtattactacatgtagtgcatgcggtactaagatcaaatccagtgctccatgcatgctaggcactctaccaatggagctgcatccccagcccaagaagtgaatttttaattagcagtatcaaccaggcatgcttaatttttggctccagtcattcttttttttttttaattgtggaaatgtcacatgaactaacaaagaagttgtctgaaggtttctttttaaattaaagaatttaagaacactttaatattcaggcatttaaagaaaatgataagactttaatagtagtaagggtatgtggttagaggaattaccttgaataagtcataaagatcactcctattttcaccctggttgtcatggaccccacgtggctcgtatcccttattatgccagtttttaaaaaaattattattattaagatttgtgaattccaaatcagacatgtcttccttagttgtggtgaaataaaactgattttcttgaaattgctcttttagacactgtaagtttaaattgccttctttctaaaattttccaagtcatcacaaaaggcctagagttctctgacagtttgctgtaagaggcttcacggtgctacatggactttttggcaaacatggctttgatttctcccagagagaagtttcccctttaaaagcctgctctgtgatcataattgatcacagacaagcacctgtgtcataattgctgctgacatagcagcccgcatcaccggaggatgcctgggtgtcagcttgccttcaggtgctcagctagacttcatcaagcacatgtggagagctctgtattaggttaatgtgctaacattaacactggtgagcaaagtatgatcctcgtgctcaaaacgctgagaatccaggtaagcagagcagataagcaaagatgcttacggcccttcaatcagtcttggactggaagtgaatgatcagagttaggagacgatattatcccgacattggataataagacttttaaagtgagtaggtgactcctgatcctagacctagagggattagtttaactttaccaagaatgagtggaactggtgtctgtcatgttatatgtctgtaatcccagcacttgatggccaaggcagaatcatgagttcaaatccccccatcttgggcttgtcagagagattgggttcgggggtaggggagagaaaggggagaattatggtaaaataggacctaactagatggctcagcaggtataggtacttgctgccaagcctgaggacttgagttcaatcccagggacaccacagaggaatcctgtaaggagcctactccttatacaaccacgatcacctgctcaggagtggcaccacccacagtggtctgggccctcccacatcaatcattcatcgagaaaatgcccccatagacatgcccacaagccaatgtgatggaggcagttcctcagttgtaattctttcttcccagatacgttgaggtttgtgtcaaactcaccaaaactaaccacaggttagaattgaaacatgacctcaccctaagaattcagaccccagtgacaaaaaggaatgacaggctgaagggtgtgtgggatgacgtggcttcaaagaccaagagattaaccagcctctgtcgactgtgcaggataaaaaacgttcttctttcctgagttcaggacttagttgcattcacggaatagcaaatgttaataaagctaacacctagtaaaaagggaggacaagagtatggcttatctggggctgggggctggggtagagtgggggactaccttcttagatgctgctttggtatcctcacctcagtgtgcctggctaagatcactgtagtcttaggaatctggaatgctgttcctttgctgataagtcattctcctaaaaaaataaataaataagcagatatacaagacaaaaaaaaaaaaaaagtctagcccttttgctggtgtaagcaaagaagacagatgctcgaagcacggagtctaaagaactcgggagctgacaagctgtgtctccttggcatagaggatcccattgccataaatggaagtggcgtttcaagtgttgtttttgccaggtctcccggacttaaatggaactaaatgctcttgcaaagatggagaagagaatgaaggagaggagggggcgtgtctgggcatggaaactggctgccagcccttgctccagaggtccaagttcaaatatgcttgcaggcaagcctcagttaagtttttttgtcctcatacaatgaagctgttgtatggccagaggctggagcaggccactggctttccagagtccaacagccagcaccttttggacttccccttggttctccttctgttctagaggacacgaatacttctcatccaccctggtataagctctaggaagcaggagatgcactgctcatgaatgagagtctcagccctgttagcacgcagcttcaggaagtgacagagcaatcagatcagataataaagatattcagtagatcaagaagccattaagcattttgtcctgcttttaagcatttgccctgcccccaacaaccattttagatgatggaattcctggactgcttggttccttttgctatgtcagtttaaatttgtaagctccccctacaggaatgacttgactagatgcccatctgatttttgaagtccagagggatttctgtgcctactgctcgcagacttaatcagatgattcttgaaatggccctgaccctttcgttgggaacaatttctaaagtgataaattttctccccaccaagcctctaagtatttctccttccctccctcccttcccccttcccttcctctttcccctgcactcctccatgtgttcatgcttgtgtatgtgtgcatgcatgatttctaaacagtaaatcttaagcaagttgttacaaaagacaataggattagaggtgagagttagtagaggcatttaaccacagtgataataaaatgggcatttatttggttttgactctgccaggtactgttaaaggtacttaatgaattgaattcatataatactcagtgtgactctgtgttattatcatcaacaccttaaaaatggagaaactcacaggggaatgccagggccaagaagtgggagtgggtgggtgggggagtgggtaggggagcgggttggggacttttgggatagcactggaaatgtaaatgaaataaatacctaataaaaaaaaaacaaaataaaaaaataattccaaattttaaaaaatggagaaactgaggcacagaagagtaaagtcacaaagttgctagatcattgagtctggctcccaaatccattacttacagccaaaatgctggactgatttacagtgaatggggtgttacctaagtttcatgcctcctgaattcaggagagccatgactatacttctgggtatagttcctaactattcatcacctttgtgttctgatcaccaggcatatgtaggaaataatgggaggagaaacagggtggagagtaaggggtagttgtgtcattgagagcacacacctgaccgttcatgtgctcatatatgcacatacttatttattattcatctaaagaaagtatgcatgtgcatttgcatagatgtatatgcaagtgtgcatgggggggggagcagaagtcaaccccaggtgtcatcctcaccttcttttcctttctgattgaaactgggccttgtcactggattggatcccaccaagttggctaggttggctgtgcagaaagcttcagagatccgtttttctctgcctcctcagtgcagggattacaagcccaggctcacacctaacattttaaagttctgtctttcttttccaaacatcagttctgggtattggacacaggcctttgtgccttacaaggctaacacttacagactgcactatccctgtagcctctttttttctttgagatgggttcttatatagctctggctggcctgaaacttgctgtagagctgagactacccttgaacttgagaagctcttgtctccatgtgcttggattgcctgcattcaccaccatgcccagctctgcctcttttttgtatttgcgtcatttcggtactccctgagactttctcggcaggttatacatagcccttccccgagggatcagtttttcccattccaggtcatgggaaggggcaaggaggagaagacttccttttcaagagcctgtcagaaaaccatgtttggaaaggaacacatgaaaattgatcagtaaaaacagtcaagagcttaccagtcctctgtgtatgacagggtgccctcagcagctttagggtatagggggagaccagccctgctttttttaggaactcagcattgagaaaaccagatatccagggtcccagggtcaccctctctggccctgtcatttacccatatgctatctttataagcagcatgagtgttttacctacctgcatgtatgtatactgcatgcagtaactgcagaggtcagatgagggcatggatcccctggaactggaattacagatggttgtgagccactaggtaggtgatggaaactgaagctgggtcctctgaaaagcagcaagtgctcttgggcactgagccatctctccagcactgcccccacatccttttatactgttttatacttaggacttaaaagaagatccaattcttacacaaagacaattgaatgtcctgctgttattatgctgtatgaggttgtactggtattcaaagatacatttggtatgttatgagatggcatatgcttgtattcatattgtggtcccatttgtgtaacaaagataaaaatacacaaataacaataaaatatataatgattacatctacataaccaggcattactttaacttattagtctttcaaagaactctgtgggtgccaatgagatagttcaatggtgaaagtgctttgcctcctagcctgattatatgagtttgattcctgagtcccacattgtggaaggaaaaaactgattcctcaagttcccctctgacctccacaggtggcatgtgcacaacacacacacacacacacacacacacacacacacacacacacacttttttcaagtaatatctatatagtagatattactattatatcaatcttatatggataaactaatgagtagaaaggttgccacttctttaatgttcctgaaatagtaaatgacaaggtcagaattcagtctcaggtgttacggttcccaagggtctactattagccaataggctaacctataagtggtgtgtaaatgtaaacaaaatctaaacagacacacaacaaactgtcattagccaagaggtatgaaagtgggttggaaaaagaggaagggatattttctttttacaaaatataatcctcccccactttggcaatgctggggatagaacccagagctccattgaaggagttaccctgaaattagattatgacttatttacaacgttgtgcttcttccattaagggatacaaacggctgtggagtcagtgggaccttaggcaaagggagagagcccatgggatctgtttctaagtagggagaatgagaactgggtcaggttgataagtggaaaggaaaagaggaatgtgaggagaaggagaaagaactgagcagctgaaagagtcagcaaagaaggggtggggttcaatctgtgagttgatgtgtggccaagaagtagatatttaacacagtcaaccttaaggacccacatttcagtataaagtcttggggtgaggcagatctgtgtatgcaggtcacagaaatgaagtatttagcacatttataaaattaatcagtaattgtaattttctaggtgaggtggagagggtggtcagagatcccttggaggattccagtcagaacagggttggcttcactctgaggccaactgctgatttggagggaaggttgatctcctgtctgttgattattatggatgagtagcgtcgcccatggtcacagaagcctgtcagggcaggggtcatgcgtcagctgttgggacacttagctgccctggtgacaggcctctctaacctggtcccgtgccagcagatcccagcagctcttctgcctggtctgctatcaagctcaaccaccttcgcccttgaaccaggctgagggctttagaggaagggccattggtacacagcttcagacaatgctcagccctggaaagtgacccaaagcagccttcaccctgctttccagggcctgggcagaggccactgttataggaaagactgagtcttcagagaaaggtaagtctgagaggactgtcagcaggcccaaggacagacatgcttacaatattctaataactggagtctttctggagtaaagacaagactgggttgtccccccaccatcaccaccacctatgctcagatgatcttcatcttaggacacggcacgccttcctttgacaagtgaagacgtatcacctctgtcaccatttcttcctcaaatagctgctaggatagtgacgacagctgttttctgagtgaatattgtgagtcaagactcctacagaacattcttcacaatgagacgctaccttattttacagatggtgacatggagacttagagatgctcggagtcccacttatttgtttcaggggtaggatttgaattcaggtctgttctgatctgaatctcttaaaactgtacattgtgtttccccagctggtcctttcaaacatggataagagtggcatttgagccaagcaccctctaacgagtgagcaaactgtagtataagcatgtatatgttacagggcacagtgtctcctcttccctgccttccctgctataagtaccacttgtagacatgtcgtagaagagacactcactcagcttctaagtaccatgagctcctagaagactcaaagcctcaatcttacttccgtacgtctagaactgaattcacgccagctgtgtccagcggtctgtgaggtgtgccaggctgatccttctttctttcccgtgccaagccagaggtcctcttgcctgaacactgctatctatccatcaagatgatgggcacctgagacatgtatctctgccgacagcgtctactcctggcaaagctcatctgtgtatttgtaagagccgggtgtgatttccttggtcttgagtgtgggatctaagccacttgaatcaaggtctcatctttacttaagttatggagtcccccagaagggcaaatgaggatgattctgagaaaagagacttcacagctggttcagtctttgcgtgggtagaaatgcactcactacttgtgagtaatgtcgcagacagtactgtttacaacacacccccagatagacaaagaacacactggagacttttacttctgaccaagatagagtaagaggagccaagtttaccttccatgtcataaactggacaaaatgcgtaagacaacagtattctgatgctaatcttatcaggctgttttggaaagcgcttcctaaggaagcaaaaacagaggaagtgggacttgtagttagcaggcttgctattagggaagttttccatctgataggttatttctgcactggtgaaatgagccaattcaagccagattagattatattaaaggcaggtttattgggaagctgctcgggcaagttccctggccccaaggattccttggcagacttagagccaagtctctctggaccccacaacctctcctgactccattttttttctttctctgcttgcctcacagaataccttccctcccccaccccttgagacacaggccaagggccaccttctcccctcttacccaccccctcctcctttgtctcttcccactgtcccttccttttccttaccctcacaggctccatttgatggtcaacagcttcccctttacccatctcctccccatcctcttccggcctcgatgcttactctgctctcttcctcttctgtgacctcacaccccccaccctggtctccatccacacactggcctgctccacaaggagtgtctcctgtggcatctcacacatggtccaaacaggcctctgctctcctctgcccactctgggaggtggtgggagctaagtggtttgcttgagtccatgatcctttttctctgcaggacctatccccaggttggaaacggctaggtttcttctctgccaacccatccgactgtattaaaaggttctgctacctttgccaggcctatgacctaacttgtcacgacctttatgtcatccaggcttccacccttcctcctgaggagtgtggatgggttcaggcagctgccaggcagtgtacagaccagacccaccctgtgggtaacaaggtgacaccatctacagaacccaactggaattacctcttttctaaatcgattaccagagtccatgatcctatatacccgcctgaacccagcctcctcagcgggggacgggatcattgatactcattttacttctcattcttgnnnnnnnnnnnnnnnnnnnnnnnnnnnnnnnnnnnnnnnnnnnnnnnnnnnnnnnnnnnnnnnnnnnnnnnnnnnnttagtagcttccctgaggccaagagcatccctgagagggaagagggaggtcggccatgcccatcctgctggggtcaggcctaagccaactctgccaggaatgtgttttaagtgcagtcggtcaaaaaggacattggtctctcagctgcctcaacctgaggcagtccaccaagccatgccctgcctgctgacagcatggtcactcaagtcggaatgccccaaagctatctcgccctctgagacccgccaagtaggcccaggtcagcgcaggtcccttggtcccatcaccaaatttccacctaagaaccctgccacttccctggattcttgcaaaacgatttctttcacactcttttctggtcatgcctgtctgcctaggttcgatccctgagttttggctccatctgttaggttatttgtttgccagtgaaatgagccagttcaaaacagattagattatattgaaggcaggtttattgggaagctgctctcagtcgagatcgctggccacaaaggaccaaggccaggggaattgccatggagggaaaagggaagagaaagggcagagagaagagaaggagaagagagaggaagcaagagaagccaaaatgcctggattatataggaaagagcctctgggctagggcagccctgccctggggtggtaaagtttagggttggggtcagggtatgacaggtagggactgagagatgctgggagaacctggaggccaggtctgctttgatatgtaaaatatgcacctcagtgccactggtcctggggtggaaaccatataccattgtggtgcagggaggagaaaggcaggtagtgggttcaggacaaggaactgggagctgatggagacagcagaggaaagcactggaaatggcaatgtgtcccagggaacgctctgggggatcagaagttgcctggtcagtgcttgtcagctcacacatattgggaatttagctgaggcttggggagaattacccagaaaaagccagagtggaaaacttcatagttagtggggtttggggtgagagtgcttagaaagctaggtccttagtcatgggtcagaagtatccctagacaaaaggtggttgtgatttcccctattaacagaagcccagaaaggacaaaattattcccaagtaatttagctgtgctctagaaaatcaggtatatttatgagatgacataaatgtcttaatactaacaagacaaagtctaccaggcctattatccaatccaaaacatagctggaatagagagaaacaggaatacgactaacaatgagggccatccaaacagagaccagaaatgacacttttgatggaattcgtagataaagtttgtgttgtttttggttttggtttagaccagggtcttctgcaatcaagactagcctggaactcacaatcctcctgcaccctctgaagtgtagggcttgctggtctgtgccgccctgacagttgtcaaggggtggttctaatgcatcctctgtcctgaagaaggcatagactgagcatttggaggacagggaagacggcaaaaagatagctgggtgcggtgagatatatacacatgtaatcctaaaggtttgcgaagctgagacagaggaattgcctcaaagtggatgctgcctgagcaacatgttttagtttctcttccttctgtggtgatatgaaatactctcaagaaaaacaacttaaggaagagagagggtttattctggctcagaggttacagtcttggcagggaagccaaagcagcaagagatcttcagccaatcagagagcaagctagggaatggtgccacccacagagggtcttccccacccgattaatctaatcaggatcttgtctgcctacctcagttaacagaaacaagatactttcccacgggcatgcctcgaggcccatcacccaggtaattctaacttctgccaagttgataattatgtaacttgcttcatacaaagcaagttccataccagctagagctacaaagcaagactgggccttaccataccactgtacctcacctcccccatggagaataaaaccacaatcaaacaaaacaagcaagcaagaaaacaaacacaaatttgtcttatgggcctataaaagaacacccaaactgggatgatttgcacatgtgaagaatttcctgctggtgaggactttcttgattacaagacacctgggtaggaagaagagcaaaagtgtgtgtgtgtgtgtgtgtgtgtgtgtgtgtgtgtgtgtgtgtgtgtgtgtgtttgtgtgttggttgttggggagtgtggaatacatccttttactaggaactcatccctacaactcagacaataattcttgagagcatcctcatgacttcataagggcattccttatgttctcatttatccacaccattgcgcatgtacagtgcagaacacatccaaagcatagcacaattcagcagcaacaataccattcaaaaatgactttttcaaggggctagggaggtgtctccattgataaagggcatgcttgtgcaagtctgaggacctgagtttgactccccagatttcatgtacgaaagtagggtatggtggcatgcttatataatgccagcactggggaggcagagagaggagaattacagcagctttctggaacccacagagatggacccacacatgcagctaactgatttttaagaatggtgtcaaagcaacggaatgggcagaggacagtcttttcaaccaagagcactgaatgcaatcaagtgaagttcagcccttaccttacaccatctacaagccaacttgaagtgtatgtagacatgaacgcaaagttaagactgtggaacatgtattaatctatactgacagaccacgggtccatagagaatgcagtgaggaagagtgagggagtggttatgaagagaaaggaagagactctgggagacatgcttactttggtggttgtaatgagtgatagaaataaacgtatgccatgatttaccaaaatgtgtacttcatgtgcgctgcattgcacatcaatgcaagtttaaacaaaatggaattcattttagactgatactcactaataatcagacaacccaaataataatgcccttcctatgtgctgtggagcccgacatacccattttcttccacttaaactgagaatattccatggtcttgatccttagcgttgacttcacaattcaacacctgcagtttgaaaacgtcatgttaagatgtaactgggaagagaaggatttcacagaaatggcctcatcacttcatggaacaagccctgcagaggcagtttctgtgtcattagcacaaatcttcctcttttctactgtctatgtagttgaggcatcaccaagttctaccattcctagaagtgccagcctttcgaattcttggctcacagactctcttgctacttactgtctgacctgggcgagggatcaccacttttatgaaaactctccgttgtgaggagtcgggggtccttgggggacactgatgcagaggctcccgagattgatgactgcatagttgctaaaggtggcgaaggccttcagacttcagccacctgctcttggctgtttctctcataaaggaaagtaagccagctccggcaagaatcccatctctgaaatatcttaatggtttcctggagaggttacttgcagttgttgctagttttgccctcaatatttgaagatggaatgcaagaagatctggcttgctaatgtacagcacatgactatagaggccactaaagaagagggaaactcatgaagccattggaaggaagcagagaaaaacaaaacaaaacaagcaataagggaaacctaggcttgggatagcctcattctaccatgaattagtgctccggtaacttaataattatgtgcctagtggtctcttcaattacacatctctcagtgtcacaaacagtggtgtaatttgcccattaggtccaaattagcttgggcatggtggcttatgtttgtaatcctagcatttggcagacggactaggctgtaaggtgggacctgtctagattccctttctgccaaatgacagactttgtttttttttttttaatatatcttaagtacactgtagctgacttcagacacaccagaagagggcatcagatttcattaggggcggttgcgagccaccatgtggttgctgggatttgaactcaggacctctggaagagcagtcagtgctctcagctgctgagccatctcttcagcccaagactttttttaaaaaaattattttatttacattccagctagtggtccccttcctggtcccctctcccacagttcctcatcccactcttcctctcccttgcctccaaaagggtgctccctccccagtcctccccctttactggggcctcaagtctctcaaggattaagctcagcatcttctcccactgaggccagaccaggaagtcctctgttatatatgtgctgggggcctccaaccagcctgtgtgtgctgcctggttggcggctaagtctctggcagctccctggggtctgggtgagttgaaactgctagtcttcttattaaggtcactctccccttcagcttcttcttcaatccttcccctaattcaaccctaggagtccacaacttcagtccaatggttggtgtaagcatctgcgtctgtcctagtcagctgatggtaaggcctctcagcggacagtcataagagggtcctttcttcaacctcttctccatttttgtcccttcagttcttttagacaggaacagttctgggtcagaacttttgactatggattagtaacactgtccctccacttgtggccctgactatctactggaggtggactctttgagtttcctctccctattgttggacaatttggctaaggtcacccccattgagtctggaggacagtctctcacctcctagccctctgggactctctagagggtccctgcaccacctaccctcgaggctgcatttttcctgtctgcaccccccaacacacctgatcctgttcccttttcccttcaccttctctcttccacccaggtccctccctccctctgcctcccataattattttcttcccccttgtaagtgagattgaaacatcctctattgggcctttctgcttgttacacttcttacggtctgtgagttgtatactaggtattttgtacttcttggctaatatctacttaccaatgagtacgtaccatgaatctgggttacctcactcaggatggtattttctagttccatccatttgcctgcaaaattcatgaagtcctcatttttaatagctgaatggtattccattatgtaaatgaaccatattttctatatccattcttcagttgagagacatctgggttgtttctaccttctattacaaataaggctgctatgaacatagtagaacatgtgtccttgtggtatggtaaagcatctttagggtatatgcccaagagtggtacagctgggtcttcaggtagaactatttccaattttctgagacactggcagattgatttccagagtggttgtactagtttacaatcctgccagcaatggaggagtgttcctctttctccatatccttagccattctgattggtgtaaggttgtatctcagggttgttttgctgtgcatttccctgatgactaaggattttgaacatttctttaagtgccttctcacccattggagattcttctgttgtgaattctatgtttagctctgtaccccatttttaaattgggttattttggtttttggaggtttgcttcttgagttctttatatattttaaatattagccctttatgggatatctcgttaatgaagttttttccccatctgtaggttgctgatttgtcctattctcattcttctacatatagactgccagttagaccagcaccatttattgaagatgctttctttttttcccttgtatgtttttggcttctttaccgacgataaagtgtccataggtgtgtaaatttatttctgcgtcttctattctatttcattaattgatctgtctctgtaccaatatcatgggttttttttttttaatcactaatgctttgcagtacagcttgaaagtcaggaatgttgatttcctctcaagatcttttattgttgagaattgttttggctatcttgggttttttttccatatgaagttgagaatttctttttccatgtctgtaaagaattgtgttggaattttgatggggattgcattgaatttgtagattgcttttggtaagatggctatttgcactatgttaatcctatgaatccatgagcatgggggatcttcatgtcttctgagatctttgatttctttcttcagggatttgaagttcttgtcatacagatctttcaactccttggtaagagttacaccaagatattttatgttatttgtggctattgttaagaacattgtttccctaatttctttcttagcctgtttatcatttgtataaaggaaggctactgatttgagttatttttatatcttaccactttgctgaagttgtttatgagctatgaaagttctctggtggaattttgggggttgcttatatatactatcatatcaactgcaagtagtgatatttcgacttcttcctttccaatttatatgcccttgatttccttttgtttacttattgctctagctagaacttcaaatactgacttggatagatagtgagatagtgggcaaccatgtcttgtccctgattttagtgggattgcttctaattcctctccatttaatttgatattggctgttggtttgctatatattgctatttattatgtttaggtatgtgctatgaattcctggtctcttcaagactttcaaaggggtgttgtattttgtcaaaggctttcttagcatctaatgagataatcatgaaattttttttccttgagtttgtttatatagtatattactttgatggattttcatatattgaactatccctgcttttgaggaatgaagcctacttgattgtaatggatgttggttttgatgtgttattggatttggtttgttgaggattttattgagtatttttacattgatattcaattataagtgaaatcgatctggtgttccctttcgttgttgagtctttgtgtgttttaagtatcagagtacctgtggcctcatagaatgaattaggtagtgttccttctgtttctattttgtgcaatagtttgagaagtattggtattagctcttctttgaaggtcttgtagaattctgcactaaaaccatctggtcctgggatttttttttctttttgattgagagctttttaatgactatttgtatttccttaggggttatgtgactgttagatagtttacctgatcgtgatttaactttggtacatggtatgtgtatagaaaatcatccatttcatctatattttgtagttttgtttaatataggcttttgtagtaggttttgatgatattttttaatttcctcaatttcagttgttatgtctcccttttcatttctgactttgctaatttggatattgtctctgtgccctttagttagtttggctaaggatttatttatcttgttgatttttctcaaagaaccaactcttagttttgttgagtctttgtattgttctctttgtttctaactggttgattttggccttgagtttgactatttcctgcagtctactctttttgagtgtgtttgcttctttctgttttagagctttcagttgtgctgttatgttgcttgtctgggatctctccaactgctttatgaaggcacttagtgctatgaattttcctctcaacactgctttgcttgtgttctgtaggtttggatatgtggtttcttcattttcattgaattctataaagtctttgatttctttctttatttcttccctgaccaagttatcatggagcaggaagttgttcagtttccatgagtatgtgggctttctgttgtttattttgttattgaagtccagccatagtctccagtgatctgatagaatgcaggggattatttcaaccttcttgtatttgttgagtcttgttttgtgtttgattatatggtcagtgttggaaaaggtttcataaggtgctgagaagaaggtaatcccgtctctgattagagcaggcctcctatgtccctcgtagagcatacctcctgtgttcctggccagggtgaacctccatgtcagactttcataaacagtctgaaaccaagatgaaacttgggcagaaatcagagtgaccactctggccttagctttttaaaaacagtggctgaagttgtgaaagttaagaatggtccttgttcaagtctaagtggatcaaggaacgccacataaaaccagcgacactgaaatttatagaggagaaagtgggggaaatcttcgaagatatgggcacaggggaaaaattccgaacagaacagcagtggctggtgctgtaagatctagaattgacaaatgggacctcataaagttgcaaagcttctgtaaggcaaaagacactgtcaataagacaaaaaggccaccaacaaattgggaaaggatctttaccaatcctaaatcagatagggaactaatatcaatatatacaaagaactcaagaaggtggactctagaaaatcaaataaccctattaaaaattgggtacagagctaaaaaagaattctcaactaggaatactgaacggctgagaagcacctgaaaaaaatgttcaacatccttaatcctcaggggaatgcaaatcaaaacaaccctgagattccacctcactccagtcagaatggctaagatcaaaaattcaggtgacagcagatgctggagaggatgtggagaaagaggaacactcctccattactggtgggattgcaagctggtacaaccactctggaaatcagtctggcggttcctcagaaaattggacatagtactaccagaagatccagcaataccactcctgggcatatacccagaagatgttccaagtggtaataaggacacatgctccattatgttcgtagcagccttatttataatagccagaagctggaaagaacccagatgtccctcaacagaggaatgaatacagaaaatgtggtccatttacacaatggagtactattcagctactaaaaacaatgaatttatgaaattcttaggcaaatggatagatctggaggatatcatcctgactgaggtaaaccaatcacaaaagaacacacatgatattcactcactgataagtggatattagcccagaaacttagaatacccaagatacaatttgcaaaactcatgaaactcaagaagaaggaagaccaaagtgtgggtacttcgttccctcttagaagggagaacaaaatatccatggaaggagttacagagacaaagtttggagctgagacagaaggaatgaccatccagagactgtcccacctggggatccatcccatatacaatcactaaacccagacactattgcatatgccaacaagaattttgctgacaggaccctgatatagctgtttttttgtgaggctatgccagttcctggcaaatacagaattggaggttcacagtcatctattggatggaacacagggcccccaatgaaggagctagagaaagtacccaaggagctaaaggggtctgcaaccctataggagaaataacaatatgaactaaccagtacaccccgcccccccagagcttatgtctctagttgcgtatgtagcagaggatggcctagttggccatcaatgggaggagaggcccttggtcttgagaagattatatgccctagtacaggggaatgccagggccaggaagtgggagtgggtgggttggggagtagggcaggtggagggtataaggggactttcggaatagcatctgaaatgtaaatgatgaaaatatctaataaaaaaacaacacagtttatggggaaaaaaaaaaaaaagaatggtccttgtttcccaagatgttaaccttcatagtgatccttaaaaaaaaaaaaaaaaaaaaaaaaaaaaagttggatagatggatgctcaggccagatcttaggcacaagggacacaaggctgtaatgacagcttaatacattgaggtatcaaggttgtgctttctttatttaggaactaaaagcatggttccagagtaaacatttaagccttggttcagattcggttctgctgtgcctgccagcctctgtgatcttgggaaaacagcctaacctctataaagttcagactttgtgttcaaagcagcaagcattttccacccagtagggactttgcacccccaccctgaaatatttggcaagacttggaggcattttggattgtcatgatttggggagttgggactgctgttggtattcagtgggtagaaggcatgggtgatgctaatatccagtaacatagtagtacacaatagacatcgaccctcacaatgagaagttacttcgtccaaactgacagtggagtgaaaaccaaaaaatccctggcttaggggcagtgcatttagagtctgacacaagatttgtaggtgccaaattaacagtgctgtcattagtaaatgatctgtttagtgtggtttggttaaaaaacataaaacagacaaacaaaatgaaacacacacacacacacacacacacacacacacacacacacacacacacacacacaaaccaacttctgaaaaaggatcacccacctcttggtagagctcagaaaattctctataaacagtggtaactacagcccatccaactgtagcctgggtctagccaaaaggtttcaagtggaggctctggggcctgatatatataatttaactcagcctgcttgcctgtaaagtggccatcataatatctgtcttgtaggaaatccattaaggcatgtgaagggccagtctgcatagcatagcaagcattcaactgataactcgctattcttgcagagaagtggttagggagaacactaggaggagtgtttttaagaaaacatttgttatttacttgtagttgtgtgtgtgtgtaggcatacttgtgccacagcacatgtgtaatggttagaggacaactttcagggatcagttctcttctaccacggtgtgggttctggggagcaaactccacttgttaggtttgacagtgagtgctgttactgctgagccatcttgtcagctcagaagaacactgatttcaacaagagcctctaaagtatttaatatagagtatgaaagggactccaaccaaataagcaaagaatccacccagcagtagaaaccatcagaggacctgcaggaaaggagccaggtgttcataaatgtcatctccacgacttctcacacctctctgtatctctttgaatctcatttgacagttgtggaaatgggctcacaatagttagtcacttgctgaagatcacgcagctgcagaagggcagagctgggcttttgaaacactccctctggcctgtgtttttgtgggctgaaattcagtaatgttcaactcagggcagatctccagaacattaacaagttaggaggtttctatgttcagggaaaggaagtgtgaaagcctaacctctatctgctggcagcttggatatgtggagaggagagcagaaggctgctggcaggggcctttctgctttactgcagcgatagctgctgggtcccgtcaactcaccctgcaatgtcaggcagcacagagtcatccagagagagaatctcttagtgatgtatgagacctgctggccaaagacaaggagtatgggctcttaggttactcagcattcctccccaccacaaggagagatctttaggattcttaacctgtgggactcatccactttggggtccaatgaccctttcacaagggtttcttaagaccatagtaaatatcagatgtttgcattacaatccataactgaagcaaacatagttatcaatagcaacaagataatttcatgatgaggggaggtcagtacaacatgaggaactgtattaaaggaatacagcattaggaaggttgagaaccactgttctagaagattcctgagacctgagacaattcctagcaagtacagggtggtgtgtgtgtgtgtgtgtgtgtgtgtgtgtatgtgtgtatgtgtgtgtggtgagacagagccaccataacctgaataacgtaggctgtaaactggagaaccacagtagccttcccttatgcagctctatcagagagagaatgatgacgctggaaatagtgtggagtcttgagggcctaactgtgaagagactgtcccggcagcacttggggttggtgcagatgatagtgtctgtatctctggtgtcctgcaggacccctttgcctctcctggtcttagacaaatgcatcagtcacttttctcatcctttcaacacaataccagacaataaaacttaaagacgcaaacagtggttctgactcatggtttcaggccattgcagcagggaggttttggcaggagcaatgttctttacagtgaagcagtgacccagtgggacctggctggtataaacctttaaagggccacccatgctgacacatttcctgaagctaaacaggcttctcctaccgcctgcaaattatcatcaaaagctgggaagccagggtttaaaaattgaactggtcagagcatagttcaaattcaaaccattatcaaaagtgccctgcactgtccacagtaggacagcatctgggtgactctcccagctgcttgcccaccatccttccacctctggttctcacacgttccagctcttcttcttgaggcacaaaaataatggggctggaagctgtctcaggatgtttgggtcccacatatacagaaactgagcagaaaaaaaaaaaaaaaaacaaaacaggctataagacctcaagtgtcaacatggcccatgtgttctgtgaaaggtcctgctctgccctggccagaaagaaaaaaaaaaaaaagaaagaaaaaagaaaaagcactaaaagttcactaacctggttgtttaaatataggaaaggaaacagatgctggctggcggaagtgggttggggggtggtgcttgaagcctaacctctgctgatttgctgtgggacctttctgttgttaccctgggctatatctccctcagagctcctcctcatgatagacaagagagggttatttttaagctgatctttgtgacttccttttggcttgtgtcctctgcttccttggtagtcctattctggcacagcctgtcaggctgtgggaggtgagagctgtttttgtatgggcaaatggcaaaggctgagtggggagcccaatggtgccgactcggtcaggctgaacgcaatccctccaccccccaatggactcgtgacaggacagtgtggaggagtcccagcttcaggcctaaggcttagtctcagagtgtgtaggtagcacacagcatccacttcggaatcctctgaccggatccgtagtatccagataaatacaggggtgctactgtgtcctcaaatggtctgtcctccgaagagctcccctttctggaaccaggctgggctgccctctgtggtctccgaggtctctctgagttcctggggaggataggatgtctggctaggtgcacttctagcatcctcagactgtgtgctgatgaatcagcaacctgtcccagtcagtctcttcaccgtacatatcaaaggaggcgagtggagatctcggtagctcctgggggtgggggacggcctcaaccgagttcctgttgatccctctcacttcctcttgtcttcagtatatggtggaggccctgaagtgcagctggtgcccaatggctgcctgcgataatgcatgtctgtggtttctcgttcaacctctggttacctcccggaagggccctccttagtcttctcaggagattgctatggtccccagctctaatcagggatcacacagagccacaccctcttctgatttcaaagatctctctctctctctctctctctctctctctctctctctcatatcatacatgcaggctgaagcctgggagggaatagtttagaaattagtacttccttgccaagacccaagagaacacagatcaggtctcacagaaggtagaagtcttggttgagtagcccttgtgtagtcaggcaaaataagctagtctgtgtctttccacagtaactcccatgtgacgcttagaaaattctttccacttcagagtccatgtcaagaaatagttgggtttttgagatttccccctgcagacgaagagctggctctgcacgacctttctgttgggcccaagcttctgacgctcaacctcagctactgcagaagtgaggaaaatccagctctcaaagcagcagctggattgttgatctgctccaggccttgtgtcacctgactccagcagctgctatccaagcctctggcgagctacttagcctttacggaaggtgatgtggtgttgtgtgtgcgtgaccatgcatccctcctacctgcgccctcccttacttgccgtgggtagggcagtcatcgcacctgcttcctctttgggtctgtgaaatgagagccacttcggctttgccacatctaacatctaaatggtatttaggagaacaacagcatagctccttgacttggttagggccaggcaaggagttctgtaagtggaaggtgaggagggtcgtgaagtaaccctttaaaaatgtttattaatcctttgaggatcacacacacttacactcacatacacatactcacatagtcacataccctcacagacacatactcacacagagaaactcatatactcatacagtcacatacattcacacacacccttacacacaacatatttgatcatgttcactccctactcctcccctaactcctcccaagaatacgcccacccccaacccctcctaacttcatgtcctttaaaaaattatttttataacccgttctcgatgtccatatattagtgggtgtggatccacccacagtagtgtgattgaccttccaggggccatgcccttaaagaaaactgactttccctctcccagaaggacacgccccctgcttggacttaggtttctggagcaaccttcccttaggctgaccttccggcagttccttggagccccacccagccagcagctgccctcgcctcctgcagatgtttccagtttgcagattgcttggggttctctttggtcattcgttccatttgctcagaaacaacagccagcattcttgtcgggaagtgagagagtgccaacctcaggatgacacaaaaggccccagtcatgggaactagatagagatggggtgggggctggaaaggaccagagactggaccatctgcagtgacctagacttctgctggcctctgctgcagccggggccaccaaaacaacatctatctggcttccatctggcagggcccagagtgggtcagttgagtcatcctggagggttcaggtcagaaagagccattctcctggaggcccgggaatgactggagagtcattctggttccttggcccttcacagtcaggatctattccaaggttaatgaaaggttagaaagtgtttggtattcaggatcaagtgcagacacaaatgaataggctgcgcattaaatcgtaaattgtgtgccgtgcgtttcatgtctgtcaagcagctgttttggcaggaggtgaccataatattcatcaaccttcacaccctgcccagaaggtggcctttttatagccttgaaaagtgccaagtgctctgccacgccctccagaatgagtgacaggtaagacacagaaactgtggttatggttctgaatagggcgggctcttgagatagccaggcttcacctgcagcaacggagaggcccctgtggctgcgggtgctccatcctgcctgtctaggaactgcctgcagtcagaccccccaggctggcctctgcctgggctcacgaaggggggcggtctcatagctgaaccctggcacaagcttcttcatgcggtcaagccactcacttcctggcaagtagagaagataggagaagacgtcatcgccgtcctgccatcgccttcgggtgagtccagtttctgaagctcagaaaaccaacagaggatttggagcaaaaagcttcttcaacaaaagacgagagaaaggtgccaaggaaagccacatctagaccattccaacctcaggggcacagccagcctgcagttcacggttcacagagggtctgtgggtatagagacgcttcctgttggttcagtaaccagcaagcacctcatgaggagtcactggcccggtgcccatgaggcccacaggaagagcatgggtgcaggactctaagagtggtccagaccctgccccagatgttgggtgttttttacttctttcaggtcccaaagaataatcttcctccttcaccaaagaggaattaaagacatgggagattgggcaatgtggccaaggttatccgcttagaaacaaagctcacaaagcaagaaggacgtggcatgttcaacgtctgagtcactcgctggcagccagcccattttgatttcttccccggggctgggcctcagggcataaatgcagtgggacaggcctgacacctggaggcagaagccctgtgtgtacatggagtgggacaggaggtggttcgatgcgggaatctcaccgaggcagagaactctggcacaggtttgagtgctgaaggtctggaaggtaacttccagtaagaggtgatatgactggctggcacatcaacctggatggacagggcagggagactggccatgacacatacatgcagtggatcactgtctggttgggtggtcctagggtgttcatctgtgggctcagcgaggtgggcaccagaataaacaaggagctaaatgttctggctagccggttttgacctcaaaccagtcactttgggcaccagtttcctctcatgttcaattccacttctagcacacttgtgctctaaaatctcactgtgaatgttgatttgggacaagaaaagtgatgagtgtaacaccaggaacagttctaagccctacagaaaaagcaagaagaacagggccaagaacaaatgacagagctctgatcatggaacacagaaaacagggtgcccatggcatcagattagacaaatcacactgaagagagaatggacgtgtggtggtaaacaagcatagagaagccacaaactgtcttgtaaggcattctctctaagggcctcttaaccagactgagtaacataaccccaaaagactgcagggaaaagatgcaacaaagaaacaaaaaatggaccctctcgttcctctcagcttctgcccaacacagtgacatggttagcaccctcttgggctggggtgggatgtgtgtgggggtagggtggggacagacctgggaataatatatgcattcagctccaacataaaacaggtctcccatgttgccaggtgttataagaggctcctggaggtccaaagttgaataggaagtgggagaaacaatttaactccaaagtagcataaaagtgctcaaagagaggatagcataagctgaaatggaatccatagtgagggaggggccactggctgcccaccagcgcctttgatccttcttgggagttgattgtacatacaatggtaagtgggttctgcctgtgccgtgggtggcaccatcccggatacttctgggcatcagtgccccaagctctgttattgagtcctctccaagatactcaattaaaatgacagctttgccatgttttgtttcttgtttctagagacagggtctcactttgtaaccttggcagtctgctctggctttgaattcacagagatcaagctgcctcagcctcccaacttctgggattccaagcatgcatctggctgggtattttatttttagaattacacaaatccctatgggtgaatgggaagcaacaccaaagttccttctatgtgctcgttatttgtgacttgcagtcttcccaaaagcatgtgctcataataaaagaacagagcatgacaactaagataccaggagccagggctggagatttgactcagtggttaagagcatttgccacggactggagagatggctcagcggctaagagcactgactcctctaccagaggtcctcagttctattcccagcaaccacatggtggctcacaaccatctataatgggatccagtgccctcttctggtgtgtctgaagacaaaaacacagtgtacttacatataataataaataaatctttaaaacaaacaaacaaacaagagcaatggcaacttgtgatggtttgaataaaaatggctcccttaggttcataggggagttgcagtattaggaggtgtggccttgttggaggaactgtcactgtctcagaagctcaagccaggtttagtggcttatggtctcttcctgctgcctgctgatctagatgtagaattctcagttactgttccagcactatgtctgtctacgtgccaccatgcttcctaccatgatgataatggataaaacctctgaactgtaagcctgctcagtaaaatgttttccttataagagttgcttataaggctggtaagatggctcagagggtaagagcactgactgctcttccgaaggtcctgagttcaaatcccaacaaccacacggtggctcacagctatctgtaatgggatccgatgccctcttctggtgtgtctgaagacagctactgtgtacttatgtataataataaatctttgggctggagcaagcagggactgagtgaccaaagttgactggagcgagcagaggtcctaaaaagttcaattcccaacaaccacatgaaggctcacaaccatctgtaaagctacagtgtactcacaaatataaaataaataaatacatttaaaaaaacaaaaaagagttaccgtggtcatggtgtctcttcacagcaatagaaacgctgagacactactctctgagaggacctgatgtcagttaccagcactcacaccaggtggttctgagtgccttgtaactccagctgcatgcaagtgatgatgacttctggtctctatgccaccttcacacaagtgtgtgcacacacataaaaataaaaaaataatttaaaaaaggatactagaagcctgaagttgagacaatgcgtgcagcttttctagaaaagtcttttttttgctgagacaagcctggcttgtgctgacccactctgagctcctggctgcccaggaacaacctacgccaccaagctaatgaacagagcaggagaggtattagaagagcaacatccttcctagaacctcctcggggaaataggtctcttaaaccttcagtataagcaataacaatgtagtatctttaaccgtgatgaaatgctgagacagactctgtataacaatagctttaatgaaaagccgagggaaataaagttattgggggaacccttcagcgggaagtaaagtaatgtggtttcctgatgctgtctgcccatggactagatgcaggggtgtggggtggagaaggttgagggaggattggcaggctgccctccattactccacagcctaagaggaggaaccagaaaccagaaaactggcaaaaaagaaagaaaaaaaaaatcctgttctcagtagttctcagtagctggcccaacccatggatcatgcacacccttccacactgaagagcttctgcccagtcacagtttatgtttggtataattggtgttggcctattcttgtgtgattcactggaaagggctaagatagttgactcagattctggcctttacccatcgtagttgactgtaactgtcctccctccctccctccctccctccctccctccctccctccctccctccctcccttctttaagttacctttgttcaagattttgtcaaagaaatctgagaagtaactaatgcaggttcagatcccagctccgccacttgctccctgaaagccacctcgcaccaggctgtggtctcctcaccagtgaaatgagttagcagcacttacgattaagtttggcacacgattataagtgacaggtataaaacgccaagcaaggagcctgggctgtgtcacttagcaccctgtcaatggcagggttcacacactcgtgatagaaggaccttgtagagtaagagaagacgtgtcatcgaaggggtagaggttgctggtttcttgctctctccaggagaatgtgctcaattcatctaagggtagggtgggttgagaagaagcaggccaaggcacagccccactatacacatctaggactggcggtgctctatcccgggttcgttcctgcacgtgctagttagtgcttacgtaaaggtcactgaaaatgacatcaggactcacagttgacctgtgtggaatcagagatgaacttcagagactgcgggagtcccctacttgagtgaaaaaataccagggtgggtaattgaaggcctgaggctggaatgaggaggctgggatatgaagaggctcaaggacgtttggataagttatgggctttgaaaagatcaggacagtgaccagagggccctgtgcctacaggaggatgggttggggattggaggacatgggggaaggaccaacaatgcacaacccggtgagatctacttacggcagatatcacacggtagcagaccccttctgaatccaccctgtccttaagtcaggagaccagactgggctggtctccactgtagaacatgctctttagcagaacagacttaagcacattccttctctatttgctgagagttcctgctttgtggagcaaaatgcaaaactttttttgttaggctgttcatgctccttgccagccttcttgagtccagaggatcagaatattatgtgggactagattggactgaccataggcagcctacctaccctccttgctcctggtctcccttgcaaagtccgaggtggttggctgaggccagttttgagccctccccattttctctccttagcggcagcttgtgtttcagaggacggtggaaatgtgctgccacctggtggccacatctgagcatagccccttagccagacctcaactactcaaaccacaagctgacacaggtagttgaaagacatattttgagagcctataatctggaagagtattagggatagctgaatcctctagcccttcctcataacacggcccattagtaaaattccctttaatacaatacaaatgttgaggcgacccctcccaaccataaatttattttcattgttacttcaaaactttaattttgctactgttataaatcatattgttactgttataaatcataaggtgtgtatcatatgtttatttatcatatgtatgtttttataaatcatagggtatgtatcatatgtatgttttccggtggccttaggtgacccctgtgaaggtgtcatctgtggttagcgacccacaggccgagaactgctgcgctagactttctcttgggcttagaggcctggctcacttgggcgtggttgaatcatggtagctaaggtttgggcacctagtcacaagcagttccctttccctgagcaggatttcctgtaacccaagttacaggaaccttggggttttgggtctttatccatccttttcatttttactgatactcactttagagaactcttcacgttcagagtcccaggccttgtaagttgaaagggtctcagcccagctctaagaagagcagtgagtttgggaagtcacctgaagtcttagggtcttaccggtactttgacagagagtggggaaggagcatataaaaaagggggcaaggagaagacaccctcaaagatgactctgagcactggctgtctctaaggccccactgttcgctggcacatagcgaggtctgtagaagcatgaggctttgagggaagtggtcatgacttcaagaggaagtgagtagacatgggtctatgcaagtatgcccacagcatcgtgtcagctctgagcagccaagcagcagtttccatctcccagctgcctaacatcctgtcttggctgtggcttgggtaattctgggttctggaaccccaaccttggtctcctgctaatacacttttctgtcaaagactggcagttgaggttatctaggcttttctgagaagatgcaaaagagcctatgtgtgtcctctctctggtcagccttttcaggatgctatgcagccaatagctgagctgtgctgtgctgctccaggctagagcttgggaggccttttcctggactcgggtcactttgtcagactggaaactcctcagagtccatccttgtctcccttgtagaaatcaggctctgccggtagaagtgaaattcatggtgcccctcctctcagatggaaaaaaaaatggcagggaaatccgagcttatcttcaattcactattaaaaactttcttaaatagacctttttttctcccccactctggtcctataaatggtcttctgtgagatccaaaatgtcaccagtggcctgcttatgtggccctttctctggtcctaccatctcttcctacctcagagcaggcactgaatctgcttcatacgtatgctttagtgtcacaatcttgttggcctaaacatcacattttacagtattaatttcttcctaatattgatcacatagtgacatcaaacagaggggctccttgtacttgtgacagtacaagtacatatcgtggttcatcatttctaagggctacctttcagaaacggggctctgaagccagccatatgggtttgaatgtcagtttgtcacttcctaactgtgctgtcatggccaatttatttaccctttggcgcctctgcttgcttatcattaacaagcattgtcactttctccagaagacattggatgagaccacaaataataaaatgttattttgttataaaactccaggacaccagagtgtcctggagagtacctaacaggtcctagttgagggtttctgtagctgtgtacccagtgccaggtttctgtcacctggcatgctaagaagcatctctagtcattcactgagcaatagtatactgctggccagccaggcaacatggtgtaaaaatgaaaagttctggttgggtctccaggaactgcaggcctatagagtctgggtaggaggctgttagggtggcatggtggatccacatgagggagaggtggtgtcttagttagggttttattgctgggaacagacactatgaccaaggcaagtcttataaaagacaacatttaatggggctggcttccaggttcagaggttcagtccattatcaaggtgggatcatggcagcatccaggcaggcatggtacaagagaagctgagagttctacatcttcatctgaaggtttctagcagaatattggcttccagggagtaaggatgagggtcttaaagcccacactcaccgtgacatacctactccaaaagggccacaccttctaatagtgccactccctgggccaagcatatccaaaccatcacaggtggtataggaagttttcttcaaggtcctgttagagaactgcctcgaggggagcctttttattttctaggtgggggcaaggaagagatcctgctagacctagtgagtgtgcacaggcgaagaagtgaaagggaatttcggagccaggaattgctgggagctgtgggcttatggcttcggtgaaagaagcagatggcaggagcctgaacaggctcaaaccccactaacctgggaatcataacgaaagctattatcaggaaccaggacctggtaacagaagatgtgagagactgggtccatgggtaccagtgaggtaacaggtgtgtgaggtggctgtctatcctggtctctctgccccctctcctggattgccttttggatttcaatccccagtgaacagatatttagcatggtcataagacaagctagtgagggaatatggaaacttctcttccacccctcaaactcgcccttgaacactggtgctctctgtttattcagaaaacaaaaaagaacggacatttctccttcgaagagaagaagcacccaaggcatcgcagaaacctctgggagtaacataatcctgggtgggaagccgtggtggttatggtcctctggaagagcatccactgctctttatagctgagccatcgctccagcctgtccaccttgcttttcaatgtaacaaaacatggaccgtcaccttgtttctgttgttgttaatgtagaagctgcccgtttcctgaccaacaagccttaaatagagaagaaagcttgatctcctgtcctgcctctctgtctgtggcaaatgatggagatttttctaggaaccaacaaagcgagattgcaattgctttttgttaaggaagactctttcttgcctcttggtagaaattgctttctgtaacttcccctctgaagaggacagaaagaaggcagttacagcagaagtaagaggaaaggccactcggggggctgatgaaacgtaaaacaacaaacaaacaaaaaacaaaaacaaaaacaaaacaaaataaaacaccccacgtaaacaccagggctggagagaagactcagtggataagtgtgcctgctgctcttgcactgtgtgtgtgtgtgtgtgtgtgtgtgtgtgtgtgtatgtgttgtgtgtgtgtgtgtgtgtgtgagtgtgtgtgtgtgtgtgtgagtgtgtgtgtgtgtgtgtgtgtgtgtgtgtgtgtgtgtgtgtgtgtgtaaaaattgttttcagttttgtccctgagtgtcctgaattttttaggtagatctgagtgcccttaaactcacaaagatctgcctgcctctgtctccccagtcctgggattaaagtgtgcatcacaattgtctctatcacaagatctttgtgttaagcaggctgagggtggaaatattacatgattagtgtttccacctcttctacccaatcctacccacagctcatctggtccctgaatgatctctagtttctccccaccacttgtgtgtgtgtgtgtgtgtgtgtgtgtgtgtgtgtgtgtgtgtgtgtgtgtgtgtgttgtatatcagttgtggtgggggcagtactcagagcctgatgccagccaatcattctacttctgaaatatatctttggctccccacatcctgacttttgagtgttggttctttctttttctttctttctttctttctttctttctttctttctttctttctttctttctttctttctttcattggtttggatttttgttttgttttgttttttgagacactgggttacttaggctggccttaacacagtaaccaaggcagggcttgaacctgtaatcccactgccttagccttcccctgtagctgaaactgtcagctgtcactaacagaccctgtctctaatctcctcttggagctgcctccatgtgactcaggccagcctcctgtgctctttccatccttttttttcttcttcttcttcagagggttcctgtacttcctcttggactatctcacttcttgaaacactctaaagaggagtgcttatcttgatggagctcgaaagttctctggggcccaggggacagcagaagccctgactctgtttgcctggggaagtaagaacggtggccctctcggatttggctgcagagacctgcatcctccaggttaatgggaaggcagggataagcggctgaggttgatggtcctgtaacaggccctttctgagaagagtctctaagagagagtcataccggaaggaatgagcaagttgtgagttctctggactgttgtgacattctaacttctgggcagaagtctgacaagagctgggtccactggcccatacacaacctgctgaagagccacggaagcttccgcctgaagcttttctgagacagcatggaagccgacaacaccacggagacggactggctgaacatcacctacatcaccatggaggctgccatcgggctctgtgccgttgtgggcaacatgctggtcatctgggtggtcaagctgaaccccactctgaggaccaccacgttctatttcattgtctccctagcactggctgacattgccgttggggtgctggtcacacctttggccattgctgtcagcctgcaagtcaagatgcacttctatgcctgccttttcatgtcctgtgtgctgctgatcttcacccatgcttccatcatgtccttgctggccattgctgtagaccgatacctgcgggtcaagctgacagtcaggtaacagggttgacgaaggggtggattagagagaaggctggagagtagagctaccaagtttggctcccagacccctttcgtagaaatgagtcaaactgacccttgaaatttacaaagggcagtgaatatctttgcaccacatggtttgtgaagacattagacatgaagagctgagacaggaataggaaacgagggtgctctgtgcccttctccattgaacatgggcatctgctttctggccagggtagccaaagatgatgaaaatgtgatgtatcttttagttaaaaaaagaatctgatctcaagttttcaaagtgacattgacctactagataggatatcttgttttaggagaaggggaagacaggcataagagataagtagatgggggtgtggctttgaagatgtagggtagatcttaacatggcttctgtcttagtctgttgaaaacggattcttaggatgcagtttgttctcttaatgaaatgtaaaacccccttgagacaaggatgttcttgtttgcaaaatggtagtatcattttctgtgcaaagaggacagtccaatgagaaactacattcccaggtttcttctggtttctcttgggggaagaatatagcatagaaactacagacaagctctggaggaaaacaagtctggattcctctccctgatcttttgatctgacactgggcacattctttctcggcttcactctccacctctcagagtggttctgaacatctgaaccaggctcacctccgttcaattgtagcactatcacttctggcttctgtgcagtacctgatgctgttttacctgatccataaaatgaagataataatttcacctttataaggttaaataaataaagctaataaatgtaaagttctcagaaaagccctgcctagagcctgtgtttagtaaatggtagctatgccactgccatcagtaaaatggagattgtcatgaaatatctctaaggctggagagatggctcagaggttaagagcactgactgctcttccgaaggtcctgaattcaaatcccagcaaccatatggtggctcacaactatcagtaatgagatctgatgccctcttctggggtgtctgaagacagctacagtgtacttacattaaaaaaaaaaaaaaagagaaggaagaaagaaagaaagaaagaaagaaagaaagaaaggaacaaacaaaggaagaaagaaaaaggaagaaagaaaaaggaaaagaaaaaggaaagagaaaaaaatatctctagttagctatgaggtttagttgagataagccttagttttgttcttttgtagtctgttttaggctatttaggaaggtttgtttaagcagaaatgatgatgggttctgaaacacttcaattaaacttaacaaaactctgattggttaactcaaacaccagaatagatgcccaggtagaaaggggacagggacagatagaagtgcagggctatctttcagcttgtgagctcctgtacaatagccaacagagacaatgcagagcacagcacaccagcaggcttcgaggagattctcatcagcctaggactcccaagactcagggtaactcttacaccacagcacagggaagggctggagaggtggctcagtaaataaaagtatctgttatttttgcagaggactcaggttccattcccagcacccagaaccgtcctgtccataactccagttccaggacatcccgtgttttcttctgaccttcctgggcaccaggcacacacatagtatacaaacatacatgcaaacaacacattcatatgcataaaataaaatacataagtctaaaaaaaataattattggagctaaggttgagtggaggcctataggaacctgattcctggaaacttatgactgataattctcagttgttgtgttcttaagcagatactccagaggagtttctggattttcctctgataatgctagtcttattttgtcttcatatctagagggatttagtcagagtgacattaggccatggctatttcacctcagcagattaggggattgggagagctgactttgtctttcttgttttctcccagggagtcatttcttgttgtgaactcaccatttttcccccattcaaacagatatagaacggttaccactcaaagaagaatatggctattcttgggcctttgctggctagtttcctttctggtggggctgacccccatgtttggctggaatagaaaagcaaccttagcgagctctcaaaatagcagcactcttttgtgccacttccgttccgtggtcagtttggattacatggtcttcttcagcttcgtcacctggatcctcgtccccctggttgtcatgtgtgtcatctacctagacatcttctacatcatccgaaataagctcagtcaaaacctgtctggcttcagagagacgcgtgcattttatggacgggagttcaagacagctaagtccctgtttctggttctcttcttgtttgcgctgtgctggctgcctttgtccatcatcaattttgtttcctattttgatgtaaagataccagatgtcgcaatgtgcctggggatcctgttgtcccacgcgaactccatgatgaaccctattgtctacgcctgcaaaataaaaaagttcaaagagacctactttctgatcctcagagctctcaggctctgtcagacctcagattctttggactcaaacatggaacagactactgagtaattaccttgacagatacagagccagctcgtctgccttcgcatgtggtatcagtaaacactataaggacttatcagacattcttgcttccttcactgcattgggatcatcgggctggttgccacagagttccactccttccccccaacgccccccccccactcctccctccttctgcttcagttattttcttgagcttctctaattcaattctgtggaagcctgacgtgaaggcaatgcatccctgattaccacggactctgcccttccttcccagacaaagaagtaatggaatgtggagggagtctcgtcttatcaaaggaaaactctagtggggctggacgtacagaacctgctccgaaggatccctggaatgtggggaacagaaggagcgaattgaatttaaaaagagggctaaatccacctgtgtgggtgcatttgagcaaataaaagatgatgcccaactgatgtgtagctctttgctaggattgcttgggggttgcaggcacagttgactgctcttggcattccttctgcttgcttctgggacacaatcacttctgttccaaggggcagcttcaccattgcagatggctgtcctctgggggtcgggggcaggatgtctgttatgcaaggttctgatgttcttgaaatcctaggcaacttcagcttcaggacaactggagatttgtttgttgttgtttgtttggagacagggtttctctgtgtagccctggctgtcctggaacttgctgtgtagaccaggctgacctcaaattcagagatctgcctgcctctgcctcctaagtactgggattaagggtaggcagcaccaccatctggctacagctggagatctttaggagtgctttgtaagtctggaacaggacatttgagaacactgacactaagacacacacatttgtggcttcagccaggatggaggaatgaaataagttaggtatcacaagattttatacagatactctgtatttgttacttttcagttgctattaaaaaaatatttcatgaccaagacaacttgtagaagaacgaatttatttgggtttctctttccagagggataagaggccatgatggtagggagtgggcatggcgtcaagaggcaggcatggcagccggacccagaagctgagtgatcacatcaccaccagaagcaggaagcagagagtgaacagaaagcagcgacaaggctttaacctctccaagtctaacctcactcagtgctgcatatccttccacacatccttctgcaaggctacatctgcccgcaatgcccaaaacagtgccaccaactgagggaccagcctgagggtggtggcatttctaatccaaaccaccacatagtccttgagtagctcacatgcccatatgcaggtaaatagattgcccaaaggatacagatggaaaatgaagacagggatgccaggcttttgctggctcctagttactctgtgaacccagatgaggagtcagtgctatttagtaaaagcgatctttgagtgcctgataaattctgttacgaaatataaggcaaatagtcaatattttttggggttgtgtgtgcacatgttcctgtgtgagaaggtgcacattagtgtgtggtggtggtggtggtggtggtggggggtgcgtgtgaattttgcatgtgaaggccagaagacaaattcagatatccctttcctaccaaggtgggtactgcccaccttgtttattttgaaacagattctcttttgtttttgtttttcgagacagggtttctctgtgtagctctggctgtcctggaactctcgtagaccaggctggctggcctcgaactcagaaatctgcctgcctctgcctctgaaacaaattctcttaactggccttgggctcaacacttagtctaagctggcaaggcccaggtatctggctatttccccagggctatggttgtgagtgtaggccatagctgggggggggggggtttgctatgggattagagactctccctaactctgtcaatccttttccaaccactgagattttaagtgccccttggctctgaaattctgtgaagtggctactacagttatttttatctcagtgtgaaggtgcagttgatcatggtggataaggcataatggtgtgagggtgaggcacctggtcatagtgtctctgtggtctggaaaacaaaagttgaccattgaccaagtatgacagacatacttttactcccaatattgggggggtaggatatggcggggggcagagaactctgtgaacccaaggccagccctgtctatgtagtgaatactaggccagccaggaatacacagtgagaccttggcaggaggagatgggagaaggaggaaaaaacaaaacaaaacaaaacaagattgatcatcgcgtcgtacttgaggctcagtcacttgactggagccctgcagccccacccttgcttttgcctctctgaatctgaagctacccacagagtctcactcccagagacaacgtattgatttgatgagaacctcaggacaatggttccaattaagcaaagagaagcgggaacctgaaagtggaattagctattcctgacgttcgtctaaagccttgtccttgtcctgagctcggtcacctaattcctcttgtcatcatttcagcagtggtcccttctttctcattcttcactccagaagaatcaagagctcggggcttccccttactgagtctctgatttagtttgagagcagctccaggaagaggccctgggcttgctccggggtgtcacaacctctgctcagttggctggacggtgagggggaagtgctgtagagtcttggtttcccggtactcttcacactgcacctcttgacttttaatttcaagctccattattgtgacatcgctcagtctcccctttgtgaggaggcttgattcaaagtaatcacttgactccagtgggaaggaccatcacggccgggcttgctggtatcgttagacccatgcctatgaggttctgagaaggactttgactttcttttttgttttctttgtccctctgactaccactggtggctcgctgggacctgggtggtttcattcttgccaagagagaataaagagctatgccagctcggaagaagccaaaacctggggcccagaagaagctgaagcctggcgtgtgaaaaatactcatttagcatagagtatttagcaaaggcaaaccaaaaatttctggctacaactgagtagctccactctggtttcaggtttagagatcagtgtgccaggggtcttcccatgaggcttgcctctggccagcaagttttcatcctaaaaggaaaactggggagttttctctaaagagaaaaggtacagagacacacagacaaatataggggtgggtttcctctctttcatatgaagacactgaacaaatgtacatgccaaatacatgggtttattactttgctttttaaaaatacaagtcaagtggaaatagagactagcctaccaagagtcagccaaaagctttttctcctcttccatttttattacatttgtgtgtgtgtgtgtgtgtgtgtgtgtgtgtgtgtgtgtgagagagagagagagagagagagagagagagagaatgagagagaggagacaacacaatggaaagaggttttcattgctactcacttaaactgctgtgtgcgctcctcatttgtaacatgggactaataacatccatgccatgtggacgtgtggctatgtggcagggcatgtgtgacagcacacgtggaggtcagaggacagttttgtggaggcggttctctccattttccatgtgggttctcagtaacctatgtacttttcctcccctgaatctaaagatcaatcatagccttaagagagagcgcggggaacagaatggacagctccagaatggacagctccagaatggacagctaacactgactgtaggatcttcatacccctgtcttcttatttgttttatttttttgatttttccaatttgagacagaatctcctgtcattcaggttgtccttgaacttgatatatatatagcaagcatgaccctggatctgtgacccaaacagaccaggaggagataataaatgcttactactgtctatgttactcagaaaataataattgatttcttaaaaaaatgcagtccttccttatctctgttgatactagatacaaaccagtcagtgttgtccacatactgtaattccagctccttggcgatggaagctggaggctcccaggttcggggccatccttgatctcgcatgagattgattgctgggtcagacatctgaaagcttgaccctaccaaagtgactcaggtgtcgggagccatttgtttgcttctgagtgaaaactcaggcagagtcaaggcaggtcagggtttcctggcagatttcccgactgctgagacttggaactataggagagaggtacacttgaagctcaaggcaaggggctgaaagttctattgaccttggtggaagaaacagggaggccccctggataagaagcaattgtttctgctagcttgtggtttggtttcccactgcactgtgggggataaagaggctgtgcaaaataaacttgggggctgctttggtattcactaacagccctcccaaatccatctcttgtctctgcatcttttttctacctttcctatagtcatcctcacttccccctcagagatggttgaaactcatgccagcgggctccgacactcaggcgtgagtgataaggtgatattggcaagtgtttcctcttcacatgaggctcagcattgcctgcttgagtcctcataaaatgatgaccaacttctgcgaggtagcagcacaaaagactggggtgggagtttgtactacctttgaaagacacacatcacactgccaaattttgcttatcatgcagactgtcttagttagggttttcattgctgtaaggagacaccatgaccaaggcaactcttataaaggataaccctttcctcaccccagttccttttggtcagtgttttgaccagagcaacagagaggctagctagaatagactgtgatgagaccattaacatacctaaaacaaacagctaagagcatcgactatccaggcactgtaatgaattcataggttgtcatttgctaatacacctcattcagccttatttaatctatagagtcttctttctagtcttgttcttgtctgcacattgtgtcaggggggcagggaggagagagagagaaatatatatatatatatatatatatatatatatataaaatgtgtatatatatatataaataaaatgtatatatatatatatagtcattgaggagtagataatataatgtaggtaaaaccctatcacaatgtaagctgtatacgctgaacttctatgaattagaggaaggtgccccctttctcaagaaaggctgctgttgcacaatgcagaaaagcaatctatatctggcccttggaggaaagtaccagctagctctagggtgtaagaaggagcatccagcttaaacttgagaatttaaggcggttcagaaatttacattgtcatagctagtggtcagaacatatgcatctatcaggaatcaggagaagctgcagctgctactgcacgaaaagatctacttggtgtgaagtcccagttttattcagaaaagctttctagcatctggaagctccagccctggatgctgacagcttcactcatggactctagcttgcagacatccatgcttctgacagccagatactctggccacactccccagggcttcactgcagtttggaactcaagttacttaaggatttctttgctgggatgccttccatctaaataggaactggagctctaaggatgatgggggtgggggaacaagaggcacagcctcttttaacacaaggcgaaagagggagggtacagttgctcacatgaacatatgccgatggtggtatgacttctgagtatctataaagtgtatatgtcaaagcgggtttaatcaaggagggggttggttggctctcttgctactttgagagctcagatttcgacagttgctgcaaagataacattttgttcatgagtgatagccctctgatgagttccccttgcagctgacacaacccagatggctctgcagagcaacattgcttagaataactggtggtttcttcctttacgtagggtgaaaccacttcagttcaatcatgtgttttcctcaagcagatccagggttcctgagatcctcgctctaatcattcctgccgaaggctcacttccttctcagcatggagttcctcctccttctctccttggctctcttttccggtaagatgttggtgaggaacacttctgcccactaagccacaaccttctgtggcagctagatcctcctctctacttagagccccagcttggtgtagcagtttggagcatatcaacagttggaagggagaataagaagtgaaaatatgtcatgttaacaggtcttattaagaggtcctaggttctttcttacctctgataagggagctgtggggaacttgaaaactttcactaaaattagggctttgcagggtttttttttatcagtatccccaatcctcccccctctctcctttcttccctcacgtgtttgcccagatatagacagacattcttatctcctttctgcctaagcctgacgccaaagacagtagtcagaaactggacttgccccaagcagttgtgctccctttagacttaactgcagatctctgtgggtcagcatccttgcctatgaactgaggatcacaagatcttctcgtctgattgtgatgagaagaaattgacacttaggctgtaaatttgatttgtaggaatgtgttacctcctgtaagacactggaagcagcctcttggtggtggtggggtagggttcctgcaacatacacttgggaagctgagagtgatgggttctgttgtcttctctcttgtcttttatcagatatttcccaagccatagtgaagctggacgttgcatgcattacttccccattacaaaatatcctgctatgataaagatgactacactgaagctggacagtggtagtgcatacctttaatcacagaactcaggaggccagcatggtctaaaaagcaagttccaggacagccaggattagatagatcctgttttgaaaacaaaaataaggcaggcgcacgcctttaatcctagcacttgggaggcagaggcaggcagatttctgagtttgaggccaccctggtctacagagtgagttccaggacagccagggctatacagagaaaacctgtctcaaaaaaccaaaccaaacaaaaaacaacaaaaagaaaacaaaaacaaaaacaaccaaacaactaaccaaccaaacaaacaaacaaaaaagatacctatactagtcttgtatggcaagttatcaggtcctaaactcatgaatccctttattttcagtttgctgcagctagaacaagcctcctaacctttcacttccttttagtggctgccaagataaggtaggaagctaggggcagagctaaggagtacagcaaaccccaagctcttcaaggatccttatgtccacattccacacattctcaggctagtgggaaagactttcccaagggtttctgggagctaagcacgtgaattagggctatctacattcatggaggtctgcctttttcctttagtcattttctctgtaaacacccacatagaaacatccagagatatgcttgattaatctaggcatctctaaatccaatcaaactgacatcaagattaactatcacaaatatctccaaataaaggtttcttcagcgatggcgtcattctgcagactgtttctggcttgcagatggctgtcatcttgtgacttcacatgattttacctcacaagaatttaaataaggaaatcagccatattggaataagaagtacgctagtgggggctggagagatggctcagcaggtagctcacactgtaacttcagttccaggagatgtccttttctgacatttggacgctgggcggagatacggtgtacttatatacatgcaggaaaagaacacttataaacataaaatataataaaatttttaaaaagtttgagagccacaccaaagatataattgtttcttaaaggccttgtttccaagtgcagtcataacacactctgtatagtgattagggtaccaacatatgaagaacacacacaacttaacccattatactgaccatttataagtgaacaaaatccaaatttcaattaacttattgtcttagtcagggtttctattcctgcacaaacatcatgaccaagaagcaaactggggaggaaagggtttattcagcttacacttccacactgctgctcatcactaaaggaagtcaggactggaactcaagcaggtcagaaagcaggagctgatgcagaggccacggagggatgttctttactggcttgcttcccctggcttgctcagcctcctctcttatagaaccaagactaccagcccagagatggtcccacccacaaggggaccccccaccttgatcactaattgagaaaatgcagctggatctcatggggcatttccccaactgaagctcctttctctgtgataactccagcctgtgtcaagttggcacacaaaaccagccagcacacttatcttctagggcccaggagagatttggtatgttttcaagaataatgaacactgtgtgtgtgtgtgtgtgtgtgtgtgtgtgtgtgtgtgtgtgtgtgtgtgtgtgtttatttgttcacagatgccatggtcatggatgaaaaggtgaaatcaggtgttgagctggagacagcttctgcagtctgtgtctatgatgcctactacaaggaccacaccaagtactggtgccgtggctacttcagggactcgtgcaacattattgccttcacccctaatagcaccaaccgtgtggccctgaaggatacaggaaaccaactcattatcactatatcctgcctggtcaaggaggacacaggctggtactggtgtggtatccagcgggacttggccagagatgacatggattttacacagctgattgtgactgacaatagagaagaccgggccaatggcttttcatctggtaaagagactggcaagggatctttgaagggtaatgggtgtttgttgaggtagtaaaggattcaggtctggtggtgtacacctttaatcccaatacttggaaggctgtagcaagtgaatctctgggtgttcaaggccagcatggtctacttaagtgagttccaagccatcaagagctataatatgaaaccttgtatcaaaacaaaactaaaataaaaaccacacaaaaaccaaaacaaacaacaaaaaactcattgaaggaagtggctactaactcaagctcctattgtattataccgattccactaagcaggatggagctggggtttaggtattattttgtaggaaagaagaatgtataagtgctaggtatgcttataagttccttttcctcacaacatcttgacttagaccttggaagaggctagatggtctcaaagacccgagatctttgcactaatggtcaaggctttgaggctctcttgaaagctcagccttgtaggtctagaaccttagagatggctcttttagaagtgagtgaggttgcaaaaagagactcaggtttcttatagctgtgcagcttaaagatttttaataattaatatgaattaaatattgcggtcaaatttgccagcacccacttttacgaaggtgaaatgtagttatcacttagaggctactgggagggactgggaccagagggccaagtcttggtaagccaaataactgtgacttttagctggagctaactcttgggatctcccaacgttcataggtgccttacttctctggcatctgtaagcccccatctctcaggcagagagctctggaagacacccgagctgttctctcattgttcctatttggagaagcaatgtgctttcctgtcactgtctggagcccagtggcagtaggaaaaacacaggggaaggactggtgagaagccgcataacccacccccctctccagttcctgtgctgggaagactcttactcacatttaatctaccagtaactgattcagcatgtgacccacggcgggaggtaacatccacgctggctttgtttccacttcgtgggtatctgctttaaatagcatttcttgaggtttaggctcaggaagagaggaatcttatcaaaacctgctcctttaaagagacacagaggaggctatgttggtctcccctatgaattgttagtagctatcaggagctatgtcaccggcttactcatttcctaaagatgggactgtctatttgatacgtcaaacttttttctcttgggaatgaatctagcctgggactctgagcacaaactgccatttagcctgcacaaggcctgtgtgcaaatctgggaaaagtttcccttcctctggttgcagaggactcagtagcagggtgcatatcaagtgcactgtgggttggatttcagcctctacttctcactccagccttgtcccctgtccatggcatgcttacgcaacagttaatgctgtcgatgttttacacaaaaaagccaagaatgcacttattctctggagagcaaaaggaagacaggtgggaatgcagctggaagcaaaggaaaggctctgaaataggctttgttatcaacaatttctttctgattcagacccttcaggcaataggacccggagctgtagggcttccaaagctgtccaaaaggcagagggctcccggtgagtcgcaatctgagatgattgggttggggcatggatggggtgaaccacaatataatgtagtgaccgggttacaactcttactttgtagctgtagtgtttctctgtctaaataatcttcattgtaatgatttggtttctttaaaaagactattttgtttgtttgtttgtttgtttgtttatttgtttgaaagcagcagaaaatagcctctagttagtttataaataggggacaccgtcctaaggaaagagagagctgtctgaagtgcagagatagggatgcaggccccaggacctcatcaggactttatcttcatctctagccccattttcatctgatgcttgcgtgtgcatttgcttcttatctttctgtgtcgctcttctctagctctattctgttctttaaaaagagtttgatttatttttattttacatgtatgtgtgtgtgtgtatgtgtacatacgtacgtacatttctgctggtgcccgtggagccaagaaaagggaatttgatcctctggaactggaagtaaagatagttatgagctgccatgtggatgctgagaactgaacccggtcctctgtaaaagtagcaagtgctcttaacttctgagacatctctctctctctctctctctctctctctctctctctttgttgttgttgttgttttttctttttgagacaggatctgaaaaagtttccttccattttcttatgttgctgaccgttgaccttaaacatttggtgcctctgcttcctcctcctgagaaatggaattactggtgtgtgctaccacacccagcacacaaacactctaccaactgaactatccccccagcctgtatttcttctctttctctttctctccccctccctcttcctttcccactttcctttctttttgccatagcaggtgacacctatgtatagttccccaatttacttctcccccattcataggaatggctgaagtctgtggttttccacttcttgtcccgatttaacctctggggaaggactcactggcccagcttggtcaaatgcccatcagatccaaagaacagggtcactcttccagaatgtagttgtcaggagctaccggggctgggctgggactggtgtgagaagaaaaccaaaaggtctccttccaagggacctgatatctgatgtggtttcttctagaatgtccattctgatcatttgtatactgattaccagtttggggatcatctttataatcagtcacttgtccagaggaaggcgaagccaaagaaatagagaaggtaaatagtctggggctgggggctggggggcatctagagttctgtggggcagtgggtgtgtgtgggggaataaagggggtgggagagaacccgcatcccactagagttctggtgctctgggcgggcagacacagaggactgcctctcgctctccacgcagccctgggtgggtgtctggctgtatgaagccatggaccccaggttcgcggggagtggacagggtacagtctaacgtctctaggccttacagaggccagagataacagtttctcagtctcggttattccagacgtcactggataccgtggaagagctgagaacaaagtggggcagctcggtcatccccggaccgaagagaggagagggcagggagggggggtgctggatggttcccacgcaggagagtctttagtttggtccggtccatggttggagtacaggaaggccttccggtgggagattagacatgactctttaggggaaagcctattccattgttcaaccaccgcaggccttgatgaacagagacagtctatagttttagagctttattgtagaaagagagaaagagagaaggtaaaaagagggagacagaggccgggcgtggtggcgcatgcctttaatacccgcacttgggaggcagaggcaggcagattactgagttcgaggccagtctggtctacagagtgagttccaggacagccagagctacacagagaaaccctgtctcaaaaaaacaaaaacaaaacaaaagaaaacaaacaaaaaaccaaagaaagaaagaaagaaagaaagaaagaaagagggagaccagtcatggccacatggagagaaaaggggaagggaaggagaaaagtagagctagagataagagtaagaaaagtgagagcttgagagagagagagaggaggggctaagcagccccatctatagtgggctgggctatcttgtagttgcagggtagctgtggggaggagcatacctggctatagtcaggtaactgtaggggtggagtctagccagaatgccaggaacttgggacattgtctgtgtgactctatagtcacaggattatggagttgggggtgtcaggcactgtctctgagaatgtgtctcacagttccatcccttgcagagttttctttctttctttttttttttttttttaagatttatttattacatgtaagtacactgtagctgtcttcagacacaccagaagagggcgtcagatctcgtttcagatggttgtgagccaccatgtggttgctgggatttgaactctggaccttaggaagagcagtcgggtgctcttacccactgagccatctcaccagcccccttgcagagttttctactgggtctccggagcaagcctcgttcaaccaaaacaggctgcctttcacggtcccacagagtttcacatgaatgaatgtgaccctcctctaattgcctagtcacatagataccaaggcagctagtcagcccactaggctgaggaggatgtataatgagaggtggtggaagaagcaaggtagtcttaagtggagtagatgcagacagcgaagaaggaagacagaaattaactgtatgtaggttccatatctgcagggctacctgcctcccagcacacaagctttggacagtagcctgatatccttactgcctgtctgaaagattgtattcacctgtagggatacagacaaggctttgtcaaatgatggagctactataaccaccaccaaccgagccagaatgtatggcttttgccaaggggtctgtgtgggacatgtgggcccaggatctcattccttagctttgtgtctctgttttctcttggatagttactggcaaaagcatcagtagaaacccacaagcaagccaaggcccgtctatggtctccataactttggtaagttccatccttatttcctgcatcctcagccccagcagaaccctgtcttttgctctaccctttgacagagagaggactgtgactgtatgtctttgtctgggacacaggcaagtcctaccatctggaaagttctctaggtcaccaccatgtggaaagttcaccatttggctaagctctggagcatttgcagaagtgaaagaataccacgagcacctctgtttagccaaggcagtgctgtttgcttttgtctctttatgatcagaacccaagcaaacaccttggacaatgaagaggctataggtataattaaaaaatggagtctagtcactctgggtttggaaacatagaaaaacatttcagaaaaataatgattgagataaaacaaacaaacaccttaaaacagaaacccaccatcatcaccaaatcccagtagcatcctaatgacgaaagatctattaatgacacacacaacgggccagtgcctggaggagccgagctgtgaaactaaggctacaaggtctcagtctgctcctgtgagatctaggtctcgtgcagacgtagagcaagctctataagaaggtaagggaaaggctcccacagtgaccttgcctttttgccatctagaagctttgggatcagtggaggtgagggtatgcagaaagcatgtctggttctatcccctgtaggatacaattgtagtttgtatttctttcagaaacttatcactgattctttaagatatgaccctgggcaacatttctcttttccaagctagtttttctctctacgttaaaaactgttcttatactcttctgagttttctatccatccatccactcatgacccaccagccccactcatgcacccttcattttgcaaactaggaacatgctagttgccgaggttacaaagacaaacaaaatagattagcatctgtcttcatggagtgtatgatgtaaaagaggaaaacagctgagtggctgtggtactcccagaagcccaggcagaagcatctcaagtctgaggccagcttggactacacagtgagttctaggcttgcttagactacagagtgagactctgtctcatacataagcaagaaggtgttgtggtggggtggaggagtacaagcaaccagacataagcacacatgtaagcttgtcagctagaataagcgaaggaggcgtgatgctataaatgataggccaatagaatccagtgctgttctctttagcaaggaaccagcaacctgttttagccatggcctgttccctcatccttgggcaaacttaggagcctgaaccaaagtcccttctagttttgttattcttggcccctgaagtccagatacatttataccatcaaaattcagtgagaggggagcaagccctaggtatcaatcaagctttcctacagctgcctgagaagtctcacagggatgacatcacactccagccctgaaaacaaacattggtggtttcagggccagtaagatggctcagtaggtagaggtgcctgccaccaatcctgttgacctgagtttaatcctcagtactcagatgtcagagagaacctagttgtccttatggtacacacactatagcactgtgtgtccacacacacacacacacacacacacacacacacacagagagagagagagagagagagagagaaagaaagaataaattaaaaaaaaaaaacaagccttgcgtattttgttcctgggaatcccggaacaccatttgtcatctagaagctttgggaatgcttatgtttgtttgaaaaaattcctgagtatgggaatgtaattttcaatttagaagagaggaaactaggcccagaaaagtgaagcttgtggctttttgctgacaaacactcagacaagagccttcaactcagttttccttttctgtttcccaacaaagtaggcaaggatttgaagttctttccacgtgtcctgactcaagggaatggcttgaactgaacatgtgtgactgaagatttctttcacttagctcctaaataaagtgatgtcattacagtagaatatatatgacgactggtctgtgtcttggagactgactctgacctttttaggatttctagtggactctgtgaccttgcagtggtcttttgtggcacacggcagcagtgagactcagaagagctttgatagagcacgccaagcaaggctgccattgtatgatctctcatgcattagattagctacagtgaagaagaggttacagaatctgggacaaagggaaatgacttatttatttcatttagcagccaataactatctgaatactgttgaaaatcccccccctcccccaggtatgactgacatctcctaggctgacattgatggaaaagtatttattgaaacgttcctaaaaagcataatattccagtgcatttctgaattggtatcaaatgttttatccaaaaatagaagatcgatagagtctgtggttctcatattgtcttagtgaaaagactctgcactccagagaacatccctaatggagataactgtcaccagagagagtgggtgctggttttgaccaatgagtaatcaaggggtgacaggtgacaagtgttttccaatcaggaagcacaaggcaagaatgaggcatcctctgtgggagcaagcagaattaccactattgcacgtgctcccctgcaagctggccatctccccatatggcacctgtcctgtttcgtcgctgcctttgttgccttcctaaggcccctgctaccctgtgggagaagtgcacatcatgtgtgtgctcggacacgtagaggctggaagataatctcacgtcttcaggagctgtccactttctatgagatatgggggtttctcattggcctggagcttgctgattaagctaggctagctgaacaacgagagccggggatgctcctgcctccacctctccagcgctatgattgcaatcatgtatgtgccactgggccccacatcttcccatgggtcctggagatcgaagtcaggttcttgttcctgcaaggagagcctttcactgatggaggcatttccttagtcccagaagcacacaatttgatatgcccaacctcagcctcagcctccagaatcctcgagtgccccccatgccctgtctgaacagggttggagtcagattgggtgttgatcagattcagtatgcgtcttgtcagattagatcagggctcttgaaatgtctttgatgagcatagttcaggttctgccccgactcctttctatagggagggaactccaaacccctcagcagtctgagggaaagggccagggtctagacgtcatacttgcatgcttccttgtagtctttcttcttctttgagtaagaaacaccccctcccacaaaagcgttctccctctgctcctgaccagtctcagtcttgtccagtggtcatgaattgaatttatacatagtcaacttaccagggagctaataattcttcagtgaggggtcagactgtaggctcatgtcatctctccatgcctgggcttgcacaggtcttaatgatgccacaatagctatggatttgtgtgtgtgtgtgtgtgtgtgtgtgtgtgtgtgtgtgtgtgtgtgcatgcttgtgtactaggttgtacatacacaccacagagtaaagttgtcagaggacaactttcaggagtcagttctctccttccaccgtgtgagtcacaggactaaactcaggttgtcaggtttggtagcaaatgtccttatctacttcaccagccctcaggcttattttataaatgttttcttcttgcttgatacttacatttcagagtaagattgcttaattaaaaagaatcttgctgattttttcatggggtagtctatatgattgtccatttgttttggggaataaaatgaacatgtttaatctctacttttggctctcaaccaagttgtcacacatatctctaatgccatacaaaggagatagaaacccacattttagtagtgttttataccatacagactttgtgttggcttagaattctggtcttgatttctggagaagatgaagggaccaaccttggaggagggtctgccattatttgaaaatcttcaactgttcattggcccctccctggttatcatcactgcgtttctttgtcttgagctctacccccaccctttggaaaggtttaggggcatcatcactcaaggggctgccaccttcagttggagtgacagcaccagccacctttcctctagtggtgaatgtcattaaccactggtccttatgactgatgacaattaagttagatcaagcctaaaccaccccaactacagctttacatagagtgtggtcccaggtttgtggaaaacaacaaaatcaaacatatgaataaatccagaaagcaacatgtcgaaggagctgagctgaggtctgcattctgcctcatgggagaggcagatctgagtctgtcactttaatctgggaatagatagtgggctccaagcctgaggagtggtttctagtcaagtcattgctgttttcttctgggggcttgaaagtcatgctggcatacgtgagtgactcctttgataaagacgacagcttttggggagaaagaggagaagcaagtgaagcaaaaggtgtctctttaaaagtgatccagaaactttgaaaagtgtggacccaaagagagcagaaaaactcacaaaagaactacttgcccagagtccagaaagtgatgccaatagtcccgtccacaatgcaggatagagaggagacagaataaaccaactccccctaaataatttggtgtaccaccttcaccacacgcaatctccctcttgcacccctaaaacaacacgtggtcttactttggtgggaggctctgagggagggtcctgggtctgggcactggagtgacctgcagcaaacaaggaggaagagagttgtcctttcactagggggtctggatgagtgggagcctctcactttaggtggttagtgggtaggggtactggtgtgtgaagagcagcaaggaggagcagggaagggcctctgaggtggctctgcaaagagagtgggccgagctccctccctcctcttccccagcactcacatcgctcttagtgacagtagaagagaccactcacattttctgcagctcttgacaatgaggaagataagggccacaatgagcagtgtcagcagaaccccagcaaaaaaggccaagatgatgtgttcctttctgttttagcagaaacaaaagggagtagatgacctgctagcagacaggccccttgaagcctttccggaaagccaggcttaactttcttttttttgttttgtttctttttttttggtttttttgagacagggtttccctgtatagccctggctgtcctggaactcactttgtagaccaggctggcctcgaactcagaaatccgcctgcctctgcctcccgagtgttgggattaaaggcgtgcgccaccacgcccggctcaggcttaactttcttatgtgggctcttacgtgggctggaggacttgctcccgcccactgctggagaagagacaattttgcttttggggtccgcagtcacaagactttctcccaatccctccctcaacactccacatcccagcattgtgtgaagtgtgtagtggggctctcttaaatcttgggcaacgttgagttcatactgcttgtaacccagcacttgggaagctgagactggaagattgtggcagtttagaggccagcctgggccacgttgtgagacatgctcagttcccctcccctgccctgccaacagaactatactcctaaggtcaaacactgagttcttccaccgttcctgacctcctctcccactcattttgcccttcccaaggccctgagacaaaatggtcaataaaaaccaatggactggaaatgccacaaggaccggataaatgtgttcctttacttggggttgaagaaatagggtgtagagctggtcactggggctgtcgtggagaatgtgcctgcagagaacatggaaggtatcagtttcagggggatcagtatctctgccctactcctgccatccctctaggataagaccccaagcactacccatgggagctttcaagttggctacagctctgcagaggggagaacaatgagtcttttttgccgatgaccccaggactttttgcatgccaggtgaagccctctaccactgagctacatgccaccatctgagtgagaactttaaaatgagaagtagagctgtccttgaaatggtttacaaagtaaaggggcagaggtatagtgggaagccctggggagatgtggttctgagtttagctggtacttccctagtttcttgtgaccgccagagtgtatgagtgtgtgtgtgtgtgtgtgtgtgtgtgtgtgtgtgtgtgtgtgtgtgtgttttctagtgtctaacccacagggagagaagcaagaagaaacatgaagtatattttcataaactaccagctgatctactcagtttggaggacaggtcaggtctttctgattccttttgcctcctccttggtgggcactggcttctgcagtgtagtgcacttgaattcttctagctcagccacactctggccagcactacttcccggggagctttgaacacaactcctccttttactaattcaccgtaagcacccagggaaatgatgtctgtcccgaactcacagattgtggatttaggtgtggaggaagtagatcccatgctgtcttctcctgagaataaaacaggtacgttttagcttggtctggaggctgggcgtggcaatgcgttcaatggcgggtggttcagaatgggttaatccctctatggagttgcagtgatgtctcattggtactttgttcacctggacatattcaaccaccagaacgtaggagcccttttaagtctagcatttaccctttgctttgagataatcagcagctgggtgtggtcacaagtgtctctaattccaagcacagggaggtaggaggaccaagagttcaaggtcaacctcaactaaatagtaaattccaagttagcctctgttacatgagacactatcacaaacaaacaaaaataaggggctggagagatttgatggttagcagcactcggtgcttttctagaggaccagggttcaggtgccagcacctacatggcgattcacagctatctaaagtccagttccagggtatctgacaccatcttctctctggcaccagtattaaatgcacatatattcaggcaggcaaacacccaggtacattaataaaaagtaagaaaaaaaaagaacaaaatcaagaaaactactagctattaggttacatagctagtctcttcccccactctctcactcacccaatgattcaatcaatcaaaaacataaagcaaaaatctagcaccttgggggccaccaacacagtacaagtgtatggctttggcacacctggtgactcctctgttgtaacccataaagacatatagtgcttctttaaagtatcgtctttgagatatgtgatggcttttcagacatgtatgcatgtcactgaacaggtagtactgaaatgaacgcaaagatgaggtggggagctggctcagtgcctcagagtacttgctgctcttctggaggacccaggtacgagtcccagctcctacacggcagctcacgaccacctgttaactcccattccaagggatcagacaccattctctggtctctctgggcaccagacaagcatgtggtgctcagattacacccaggcaaaccacaaaactgtaaagcatctcaagtcaggaaagtaccctcacctggactcctagtacacattgctagctgtagctagcattgtgtagctccatttagccccacacctgcgatttattcaagctgcctgcaatactgctcctcattcaaggccagacctcattcctgctcagcatgttatgctcattcttgcatacttctaaaacccttaagaacactcttagtggtgataggcttttctgagcagcggcctcctcaccacgtgtgtgggagatactcggtaagatgctgtgcagatgtcaaagaccaacgagagcctcagcccctgcgcagtacagattgtggtttttcttatacctgccacatctgggacgtttattttagaaagtatcacaaggtgagcttcaaaactaaaataaaatggtgtaatcccatcgatagaccatgataagagctcttcaacacatagggctgttcatttctggaagttctctatattttcaaataacagttggccaggaagaactgaaaccggcaagcagacccgtgagaaagcaaaccaccaggttcagactgaccacactgcctctctttcttctacttttcttaaaaagatttatttaaactaaccagtaccccggagctcgtgactctagctgaatatgtatcaaaagatggcctagtcggccatcactggaaagagaggcccattggacttgcaaactttatatgccccagtacaggggaacgccagggccaaaaagtgggagttggtgggagggtatgggggacttttgggatagcattggaaatgtaaatgaggaaaatgcctaataaaaaatataaaataaaaaaaggtgtatttacttatttaatgtgcaccagtgttttgtctgtatgcatgtctatgtgagggtattaggtcctctggaactggagttacagatggtttgagctgccatgtgggtgctgggaattgaacctgggtcctctggaagagcagccagtgctcctaagcactgagccatctctcgagccctgacactggactctcttaatcagttccatgcttatacaaatgttttccaatgtttttaataactaacagcgagacaggcacttttacatgtaaaatgtcagctacaaccctagttactttttggtggccacaactttaattcatatttaggcaaacccatcattaaaaaaacactggggttctacaaatcctctgagtccgaaggcaatttacttagaaaaatgccataagtggctcatatgctttaaccagtcagtttctataagtgaatatgcctatccttagatatgggggcaggggaagagaggttaagaaggattcctgtccccaagtgtcattaaagcaatagcaaggcagcattataccgtagctcaccattcagcattcttgtttcatcatttctgaaaaccaagactaggaacagaaaagtcaaacgctcagtactcacagctgcatcgtatgactggagtctttctggaaaggtaaagacccttctaatccagactaaataattgcccatcagaggacattttaattatctgtttagtgctggcttctgatgttctttgggtgggggaagggttacattggaacggctgtgtagcacaggcctcagtatggagtgtgagtctctcatgccagatcaaactgcaaagagcattgttcctggagcagcagtggagtacaggcatctggagcctagaggatgacgcgtgtgctacaaagggcatggctggagaagtgacccaagcccttggaggagcccagaagatcgtaagttggatcccagacattggacagttggagattgaattttgcttttgattttggctgtgccctgatattttccctcttgaaggaagaaactgttttagtggagcccacagttaaaagacttttaattgtaaaaagactttggattttaaaagagatggatattttaaagaaattgaaattttaagaatatgtaaaaactgtgggacttctaaagttatttagatcttaaaatgtagtttcccattgactttaatcacaggacatggtagtactaagagacgccctaagggatctcctacactcctacaatggaagtccaagggatctagcagttactcagtctcacgcagcaagcaggcaaaggagcaagagcaagagctagactcccttcttccaatgtccttatattgtnnnnnnnnnnnnnnnnnnnnggagggtatgggggacttttgggatagcattggaaatgtaaatgaggaaaatgcctaataaaaaatataaaataaaaaaaggtgtatttacttatttaatgtgcaccagtgttttgtctgtatgcatgtctatgtgagggtattaggtcctctggaactggagttacagatggtttgagctgccatgtgggtgctgggaattgaacctgggtcctctggaagagcagccagtgctcctaagcactgagccatctctcgagccctgacactggactctcttaatcagttccatgcttatacaaatgttttccaatgtttttaataactaacagcgagacaggcacttttacatgtaaaatgtcagctacaaccctagttactttttggtggccacaactttaattcatatttaggcaaacccatcattaaaaaaacactggggttctacaaatcctctgagtccgaaggcaatttacttagaaaaatgccataagtggctcatatgctttaaccagtcagtttctataagtgaatatgcctatccttagatatgggggcaggggaagagaggttaagaaggattcctgtccccaagtgtcattaaagcaatagcaaggcagcattataccgtagctcaccattcagcattcttgtatctgtcgctgtcagagcaaaagggaagtgctgacaagaaaatttggttggaagtctgaactgtgagaacaggaagaccatggtccacccagaatgagcaggggtaacactttttctatcaccttttggttccttttgaaattcatgttggccatgtgaggtggtacatgcttttaatcccagcacttgggaggcataggaagtgatgcctgtggatttgagatcagcttggtctacatagtgaattctaggacaggccagtcactatgaatagggagaaccggtctcaaaataaaataaaataagtcaatggtattcattggagaacaccataaaatattagcatattttgtattttattatagtatacatttatatgttctataaaatagaaagtattgaaatgtattcttcctgaggagtatgactttccactagaccttacatttagagctactgatacctctgcttttgcaggagtggttctatataaagaagcaactcaaagaaatattagcacataaaaaaatcctaggccaccctactgtaacagactaggtcatatgacaacaccacagagaaacagctacttacaaatctaggtgacaaaacccaacaaacatatttacctttaaaaacaacaatctagtcaggtgtgttggcactcactggagaggctgaggcaggagaattgccatgaggtcaaatctagcctggattacacagaatctgtccaaaaaattcaaagggagcctggcatggtgtgtttacatctctaatcccacaagttggcagaggcaggccgatctctttaaatttcaggagcgcctgagttccaggccagtcaggggtacatagtgagaccctgtctaaacagaacagaacagatcaaaaccaaccaaaatacgggcaagaggggtggctcagcaggtaaaggtacataccccacaactctggaaggctgagtttcctagatcccatgcaaaggtggaaggaaagaagtgacttgaaagttggttttgatatgtacacaacaccacacacacacacacacacacacactttttaatcccagaagagaataacaataatccaagcatttgtcagaagcagaaagttgagccaagaacaatgctctttgcagtttgatctggcatgagagactcacactccatacggtgaggcctgtgcaacacagccgttccaatgtaacccttcccccacccaaagaacaacatcagaagccagcactaaacagataattaaaatgtcctctgatgggcaattatttagtctggattagaagggtctttacctttccagaaagactccagtcatacgatgcagctgt

SEQ ID NO: 815 - DNA, 918 bp, Mus musculus
agctagacttcatcaagcacatgtggagagctctgtattaggttaatgtgctaacattaacactggtgagcaaagtatgatcctcgtgctcaaaacgctgagaatccagatccagggttcctgagatcctcgctctaatcattcctgccgaaggctcacttccttctcagcatggagttcctcctccttctctccttggctctcttttccgatgccatggtcatggatgaaaaggtgaaatcaggtgttgagctggagacagcttctgcagtctgtgtctatgatgcctactacaaggaccacaccaagtactggtgccgtggctacttcagggactcgtgcaacattattgccttcacccctaatagcaccaaccgtgtggccctgaaggatacaggaaaccaactcattatcactatatcctgcctggtcaaggaggacacaggctggtactggtgtggtatccagcgggacttggccagagatgacatggattttacacagctgattgtgactgacaatagagaagaccgggccaatggcttttcatctgacccttcaggcaataggacccggagctgtagggcttccaaagctgtccaaaaggcagagggctcccgaatgtccattctgatcatttgtatactgattaccagtttggggatcatctttataatcagtcacttgtccagaggaaggcgaagccaaagaaatagagaagttactggcaaaagcatcagtagaaacccacaagcaagccaaggcccgtctatggtctccataactttggcaaggatttgaagttctttccacgtgtcctgactcaagggaatggcttgaactgaacatgtgtgactgaagatttctttcacttagctcctaaataaagtgatgtcattacagtagaatatatatgac

SEQ ID NO: 816 - protein, 218 aa, Mus musculus
SFLPKAHFLLSMEFLLLLSLALFSDAMVMDEKVKSGVELETASAVCVYDAYYKDHTKYWCRGYFRDSCNIIAFTPNSTNRVKDTGNQLIITISCLVKEDTGWYWCGIQRDLARDDMDFTQLIVTDNREDRANGFSSDPSGNRTRSCRASKAVQKAEGSRMSILIICILITSLGIIFIISHLSRGRRSQRNREVTGKSISRNPQASQGPSMVSITLARI

SEQ ID NO: 817 - DNA, 23852 bp, Homo sapiens
tcatggagcctgaagggtgcctagttgacttactgacaaaaggctccagttgggctgaacatgtgtgtggtggtgactcatttccataccattgtggaattgagcagagaacctgctctcggaggatgcctaggagatgttgggaacagaagaaataaactgagtttaagggggacttaaactgctgaattcacctgtggatgtttttgagtaaataaaagctaatagctaactggagtgtagctctttgctggggtaacttggggcttaaagacccagctggctgtctttggcactaagcttgcttgctacttggagccatgtgttggcatactcaccttcttactcttagccccagaacaccctgatccttattcctgggttcatcagagcatttgtcagctttatgaaccattcatctattgtgagagaaagaatcctattcatttcccctggtgtttcattctcataggagtagtgggggtagggcaaaaagagacaatggatagctattatttgttgagcccttttcttttcttttgtttctttcttttttttcttttttttttttttgagacaaggtctcgttctgtcacctaggctggagtgtagtggctcgatcgcagatcattgcagcctcaacatccctggctcaagggatcctcccacctcagcctcccaagtgactgggaccaggtacatgccatcaagcccagctaatttgtttatttttattttttatatagacaaggtctctttatgttactcaggctggtcttgaactcctgggctcaagtgatcctcctgccttggccttgccaaagtgttgggattacaggtgtgaaccattgcacctggcctgttgagcactctatatacactaagtactttgcatgcattatctcctttgatcctgacaatctgtgaggtaggtaccactataatgatcatctccattttgcagaagaaaaaactgaggcacagggaagttaagtaacttgtccatagtttcatgattaacaaataatagagccagaatttaagcttaaccctgccttacaggagaactcaagcttcttgccacctattctcagacataaagaggaacttgtaacattaaagcccaaactttcaagctcatattatgtacaattaacagataggcacaaactacagctttgtacgcttgaggacttccagatttttgccttagctactattgctgatctctaattaatcaggatactagacaggatagagtgccagtcacatcttctgagcactgaatgtggctctagagattcaaggtgtcatctctggtttgatctatccaaatttgctgctgtgaactctcactttcaagaaaatattttagctagacaagagcaacaagatggagatttcaattaaacaacatcaaagtgggtaagcgtatctgaaaatgagattaattcttagccagtcctgaaggtttatcctgaacctacttttaggccagagcctgataaccaaatttatcttgttaacatttcatttcagcaaaggagctttgcttctcctcctgtcagcccaggaatcaagaattctaggtgtttcccctctaatttgtggtatttaaaaggcacttccaggatgaggccctaggtttattctagggctttgggtgtctcaggcacactgttcaccttggaacaacttttgccccattggagaaatgagaggaagggtcctgctgccctcagtctcctggtaatccccgcaccatgcttcttaatttacaaacagcttctaacgtagatacactacgttgtacactacgttgccatagaaacacttaacactgccctgttttttaaaacttgatttaaatggaccacttccctcaagacaaaacagcgttctgtcctgagtcatttggtatccttagcttctgagtttcagaactgcttttacttttttcttttcttccctcttcctcctcctcctttctgtctctctctctctctttttttcttttcctgattgccacagcttagcaagtccactgatggcttgctgggagttgtgttttttatctttgtctaacgggaatctcctgacttaaggtgttccataagcccaggagtccgtacagtgaaaataaatgtctttcgaagtaaactcaaaaaagatgaatgaagaatcactggtgaggagcttggttagaagggacaagatccactctggtttcaggtttagagattagtgttacaggagccgggtgcagtggctcatgcctgtaatcccagcactttgggaggccgaggtgggcggatcacgaggtcaggagatcgagaccatcctggctaaaacagtgaaaccccgtctctactaaaaatacaaaaaattagccgggcgtggtggcgggcagctgtagtcccagctactcgggaggctgaggcaggagaatggtgtgaacccgggaggcggagcttgcagtgagccgagatcgtgccactgcactccagcctgggcgacagaacgacactccgtctcaaaaacaaaaaagagagattagtgtcacaggaatctcctgggaacccctcttctggcttgctctctcagctaaatggtaaagaataactgcgggcttttattctaaaggaataagattaaaaaggccacccagacaaaactgaggtttgcttcctccctttcctccatatgaataagctggaactagggtggatgttgagcaactgggtttatttgccttattttaaaaatcaagacaactggggaaaaaagtagagacccatctaatgagaagaagcaaagactttttattctgagcttgctatagcaaggaggtcagctgtagtcacttgcattttggcagagactcaaaggtaggcagaagagtgggaaacatttatagtagcataaaaacacgaacttaagcacattaaaattttaatgagtttatttgagcattcaatgattcatgaattgggcagcaccagactacaagtggttcagtgctccaccaaaggaggtgagagaggaaactttcatgaggtatttgtgaaagtaagacaaagaaaatatattttattggttaaagtggaaaatccctagtttgaggttagtttggtggtttctgataggttaagcttaagttttgttttactgtttgcactgagttgggtttcagtttgctttatgtaggaatccaaggcaccagagccatcttcgactaatggccgtccgattaatttttttcatcagtgaaaaaagggaaaggctttaggtgtgccttgattggaggctgttggcttggggaagctgtaggcagggtaactagaagtggggcagcctatttgattaactgggggcacacatttggctttcttggttgatcctaagttgaaactggagacaaaaattaggagagttttcagttattaatcaagtcctggctattttttaatgtctctttttaaaaattttaattttttatgttttaaacttttattttaggttcagggatacctgtgcaggtttgccatataggtaacttcataggtttgttgtatagattatttcatcaccctggttctaagcctagtacccaacaattatttttttctgctcctctaccttctcccacactccatcctcaagtaagcccctgtgtctgttgtttccctctttttctccatgttttatcattatttagctctcacttataagggaggacatgcaatatttgtttttttgttactgcattagtttactaaggataatggcctccagctccatctatgttcctgcaaaggacatgatcttgttctttttcatggtcacatagtagtccatcgtgtatatgtaccactttttaaaaatccagtctgccattgatgggcatttaggttgattccatgtctttgctattgtgaacatacacatgtatgtgtcattatgatagaacaatttatatttctttgggtatatacccagtaatgggattgctgggttgaatgatagttctgtttttagctctttgaggaattgccatactgctttccacaaattagttatacatgaattgaactaattttatttagtaattggttcaattagtatactagttgaactaatttacactcccaccaacagcgtataagtgttctcttttctctgcagcttcactggtatctcttattttttgacgttctcataatagccattctgactggtgtgagatggtatctcattttgattttgatttgcatttctctaatgatcagtgatattgagcttttcttcacatgctgtttggccacatgtatgtcttcttttgaaaagtgttcatgtcctttgtctaccttttaatgggctgtttgtttttttcttgtaaatttgtttaagttccttatagatgctggatattagacctttgtcagatgaatagttcgcaaatacttttcccataatatcttttgctgtgcagagaagctcttcagtttaattggatcccatttgtcaatttttgcttttgttgtggtggcttttggccatttcatcatgaaatctttgccagttcctatgtccagaatggtattggctagtttgccttccagggtttttatagttttgagttttacatttaaatctttaatccatctgagttgatttttgtatatggtataaggaaggggtccagtttcaatcttctgcatatggctagccagttatcctagcaccatttattgaatagggagtcttttccccactgcttgttttgtcagttttgtcaaggatcagatggttgtaggtgtgtagctttacttctgggttctccattctattccattggtctatgtgtctgtttttgtaccagtaccatgctgttttggttactatagtcctgtagcatagtttgaagttgagtaatgtcatatcctccagcttggttctttttgcttaggattgccttagctatttgggctcttttttgattccatatcaatttcattggtagtttgataggaatcacattgaatctgtaaattgctttggtcaatatggccattttaatgatattgattcttcctatctatgagcatggaatgttcttctgtgttttgtaattctcattatagagatctttcacctccctggtaagctgtattcctaggtattttattcttttgtggcaattgtgaatgggattgcattcctgatttggctctcagcctggctgttcttggtttataggaatgctagtgatttttacacattgattttgttttctgaaactttgctaaagttgtttatcagctgaaggagcttttgggctgagactatggggttttcttgatatagcatcatgtcatccagaaacatggatagtttgacttctcttcctatttagatgccctttatttatgtctcttgcctgactgctttgagtcctggccattttgggttgattgttaaaggggccattgtttggctttctggcttaagatagcaatccgacttcctataagtctgacttacagcaggctggcttactatttattgattagcagttggtttcctgagcaggttgctgcaggttgcaggtcaggattctattttcatgtatggtgtggccatagtccacttgtatattcagtttcttttaaccaaatgcacattttctagagaaactctgctcttagctactatagctgagtatgatgggaataagaacacttgggctgcatcttgctccaactactcagatgacagatatctttaaagaccctttgtaaattctaatatgctctacagttttacagtattataactattgggaaagcagcacaatgtttgttttcctcccagatttaccatcaaatcatagtggctctactagctgtgtgaatgtgggcaagcgacttaagcttctgagcctcaattttcttcatttgtaagatcagattaataatacctgtgttgaagttgtttttgttttttgatttttactttttcttatggaaaacttcatacatacaaaagtagagtgactatgtcttagtctgtgttgctataagagaatacctgagggcaggtaatttatgaagaaaagaggtttatttggctcacaattctacaggctgtataagaagcatggtgctgggacctgtttggcttctggtgtgggcctcatgctgcttccacccatggtggaaggcaaagaggagccagtgggcagagatcacatgatgaacgcaagggaagcagggtggggggaggtgccagactctctgaaacaatcagctctcatgggaactaatagattgagaactcactcattaccatgatgacaatgatggcaccaagacattcatgagggatccacccccatgacctaaacacttcccacgagaccccacctccaacataggggatcaaatttcagcatgaggtttggagggtcaaatatgcaaactatagcagactagaagaacgaccccttatttatctattatcctgtttggtagttatcaaattatggccaatcttatttcatttgtgcctgtatccacttaccctgcctgactatcttgaaattttagatattaagttatttcatctacaaacttttcattttctatttctaaaagatgttttaaaaattatttggcttattcttattgcctatttaccttcctatttatacatctaaatagaatgaaagttaattctatggaattaatacaccaagtaatattcagaatactagtagacacatcattcattctctgtagctctggcactttcatttactttagagatactttttttttttttttttttgagacagcatctcactctgttgccccggctaaagtacagtggcgtgatctcggcttactgcaacctccgcctcccgggttcaagcgattctcctgcctcagcctcctgagtagctgggactacaggcacgcaccaccacgcctggctaatttttgtatttatagtagagatggggtttcaccatattggccaggctggtctcgaactcctgacctcgtcatccgcccacctcagcctcccaaagtgctgggattacaggcgtgagccaccgcgcctggctagagacactttttcatgtcttgggcattttgctgatatctgtgcacaatccatttctctttttgctgctttctttggtttcatgttgccatctctgagcaatgctgagtgtgtttgttttgcatgaagtattgtcagagataaggactgcctcttaaaaatataacaacaatatttgcattaattattcattgctgtgcaacaaattacacccgaaacttagaggcttgaaatagcaatcctttatcatctcttatggtttctaaggggcagaaattcagggggcattttggttgggtggttaatgcatggtgtctcatgagggtgctaggtctgcagttctctgaaggcttgacagtggctggaggatccacttctgagatgactgtcacatgtctggtgaattggtttttccatatgggcccctctgtagcctactcaagagcttggtggctgactttcccaagagggagcagcatgagagactagggtggaagttgcacgccttttatgacctagcctctgaaatcacatgccatcacttctgccatattttattgatcacacaggccagtcctgattcagtgtgggaggggactacataagggcatgaattccaggagccatcgtgaaggttggctatggcaatgccattatcacatctcaaaaaataaattgaataattatatcctaatagtatcactgtccatatattctaaattgtttgcttcaatcaggatccaaataagttccacatattataatttgtcatatgtctcttaagtcccttttgattcatagattctcctttccttgcttccttttttattcatgtaatttgtttgtgaaactcatagaggtttttgatgaggagcaactgaggtgatgtagataaaaacctaccatcatgaaggcttgctgcttgcccacatgctgacttcacatgaattagagacaggctccccttcctccagagaggacattattgcataacctggacaatctatgtatgacccttgatgggatgtgctggctctgggatgtgataagtagcacccagcttaacttcacctgagaggtgattcaataattccaacttttaaagccagtggtcagagcacatgagtcccattagaatcaggagaagctgctgctgcatagatgaatctccttgctttgtcccagctcttctcaggaaagctttcaggaagtctgaagaccgcagcccaaactgcggccacccacacttccacctgctcacgtgttccaggtcccaggcacgcaggctactgacagctggcatgcgccacccgtggccgtactccccagatgagcctgcagtgtccacttgggagctgggttagttagaaatctgattactaggattcctctcaactgtataagaaattgggcctccaagattggtagacagacaaaaggagtggcctctgatgatgccaggaccattggcagcaggacagggcatagtagagcacatacaaatgtgtaccagtgatggctgtgtgcatgtgcttttctgagtgtgggccagagcccatttacgcaggagggagatctctactgcccagaattttcttggttgccccgtcagtaagtttatgtctatgaagagcatgcggtgtggtgcattgtgcagtgtatctatacatggcagcactgcttggactaactggttgttttcccttttcactggtctcttcaaaccaggataaagccatattaagctcaagcatatctgtttcccttaaacagattcagaattcctgggctccctgggtgcattctatcattccagttgaaagtttgcttccttccagtcatgtggctcttcattctactctccttggctctcatttcaggtaggatgggggacggaacagctccagccctttaagctgtggcctttccagagactttgcactgaagtcctcacctacttggagtccttgcttattaactcgaaccatctaaggagtgggatgggaaaataaaaggcgatgaaaataggtcttgtccatattagttcttgttcttagctcagataagagagtttgtgaggaaattgaaaagcttgactaaaatgatgactctgcactcactttggcagcacatatactgaaattagaatgatacagagtagattagcatggcccttgtgcaaggatgacatgcaaattcattacgcattccatatttttccccagcatctccactggaataaaataaaacgagagctctgtattttcttttagtttacccaggttcccccttcccccttctcccctcaaaaatatatgtgcacatatatgaggacacgactttcccctttccacttgtgcttgaccccaaagatgagacttggaacactggccttttcccagctctgtctgaccttcagttgtgtggcatttagagttgctgaacctttctctgggtcagcattcatacttataaactgaagatcatgctatcttccttgtggggttgttacgaaaacaaaatgttataaagaacctgagcctgcattttagtggtttttgctatacttctggaaggctgagagaagaatgggctctgctgtctcatctcctcttcttggtcagacactttccctgccatggtcaagctggacatggtgtgcgtgacttcctcattgtgcaatatcctgagatgatagaggtgcctatgctggtcttgtacggagggaacatgaagttcttatcccctaaagacagaacatgacttcctctgttttcagccctgtgcagccagcagaagcctccaaacattactttctttctgagggtgctaaggtagggtgggagctagggacagagggcctcctaacggtaagcctcaggctcttcaaggccctccgtcaagcaatggtaggaggcctccatatttcacccacccttaggccagggaaaaggacttctccagagttgctttattagtttgctagggctgtgataacaacaacagcaacaaaaccacagtctgggaggctaaaacaatggaaatttatttccttatgttatgaaggtggtaagttcaagatcgaggcatttggcaagtttggtttcattctgaggccatctctcggtttgcagatgattgccttctggctgtgtcctcatgggccattcctctgtttgtattgtcagtgtcttaatctctcctttttataaggacatcagctgaattgaattaaggactaccccaatgaccctatgttaacttaattatctctttaaaggccttatatccaaatacagtcacattctggggtcactggaggttaggactgaaacatatgagttttgaaggggacatagttcagcccataatagttgccaatcaaaaagaggcaaaaatcagcctccgattctttaattaattatccttcaggagggcaggagctgcaatgttttgagagaacaatggtgtgtgtgtgtgcacgtgtgcgtgtgtgtgtgtgttttcacagatgccatggtcatggatgaaaaggtcaagagaagctttgtgctggacacggcttctgccatctgcaactacaatgcccactacaagaatcaccccaaatactggtgccgaggctatttccgtgactactgcaacatcatcgccttctcccctaacagcaccaatcatgtggccctgagggacacagggaaccagctcattgtcactatgtcctgcctgaccaaagaggacacgggctggtactggtgtggcatccagcgggactttgccagggatgacatggattttacagagctgattgtaactgacgacaaaggaaccctggccaatgacttttggtctgggaaaggtaaggagcctgcctggggtctggctggatgtaacccacagccatgggtgtttgctgctaagagagcactctctgaagccagtgagccccaactcagactcccactgggtactttgggcctgcctggcctctctcttcctccggcaaacatagggtggtcattaacagtgctggggaatagctggaagttggggacaaggagggtgtctgcgccctggggcacttttagaacttctcttcccttacagcaatctggtttaaggaccttagaagaggctgacagggtctaatagatgtgagatctttatgttgaaaggctttgaagttgttattaaatgtctgtgtgagaatcgcttgaaccaggcggcagaggttgcagtgagccgagattgcgccactgcactcctgcctgggcgatagagtgagactcagtctcaaaaaaaaaaaaagtctgtgtgccttgtcggtctagaatcttgaagattagattcttgagaggtgtctgaggctgcaaaaaatgacccacgtgcctggtaactgtcaacttaaataatttaatagtatacggaggtagccaggtgcggtggctcactcctgtaatcccagcactttgggaggctgaggtgggtggattgctagagcccaggagtttaagaccagcctgggcaacatggagaaagcccatccctacaaaaaatacaaaaattagctggatgtggtggtgcctgcctgtagtcccagctactcaggaggctgagaagggaggatcatctgagtccagggaggttgaggctgcagtgagccgtgattgcaccactgcacttcagcctggatgacagaatgagaccctgtctcaaaaaataataataataatttacagatataaatttcatggtccaactagtaagcaccctattttgcttttaaggaatgtgcagtttatatttggagaccacagggaaggtgtgggtggaactggaacccatagcagaaaagtcgagttaacaaattacaactcttggctggagctaagacataggatttccagatgttcactcaggttccttctgttgaatgatgaaaatctccttttgcaccagaaaacctctgtctctcagacagaggacttatggaaggcgctagcctttctttcttcctttttttttttctctttcccctgtgccttcttgttgtttccatttctagaaaggatgttcttttctatcacagtccagagcacaatgctggtaggaaaacaaaccagaagggcttaaggggtgcccttggaaacctgtccccatgctagaaagagagttttgctaacacttgactagctagtgattgattcagcaagcatcctacggaatgtaacatcgttcacacccacagtgtttctactttgtgttgttctgcttttacttaactgtgcaacttgacctgaatcttaggctcagacaagagaacgttcccacctgaacgtactccttagtttaaatgaaacacagacctctcccacgtcttatcagagggggtatcgtaggtggtcgtggtgccactgctcccgttgggttttggtggctgtcataagaaaaacatggcaattacatcaccaaatgagcagttctttaaggataggattggccctcttgtgcctctggcatcccctcctatggggaggagacctcagtttaggactgtaactatgggccacttctagtctacgtggggcctttgttcaaatctggaaaaggggccccttccttcaggtgcatggagtccagtggtagggtgcatggcctggcaagcagagtgtgggctaaatgtcggcccctgcttgtcccctcagccttgttccctgtgcagggcacatttatacaactgcgcgtggtacctctgctttactctggagtcaaccaggggactcactctctggacatagaatgacaggcagagctgcagctgggaggcagaggcaggacctggctatgggcctcacctgacttaacaaatcctttctgattcagacctatcaggcaacaaaaccagaagctgcaaggctcccaaagttgtccgcaaggctgaccgctccaggtgagtcatagtctcggcggatgaatgggcttggggcggtggggtggaggtaggggctggggtggcagcagtatgatatgacagttgatttgcaccgacaacttttctactgcacattatttctccaccttaactatgtatccttaatctgagtatttggtttcctcaaaaaaaaaaaaaaaatacagtttaggactcttggttgcaagcagcaaaaaagccctctagctattttaattaaaaggggacatttatcataaggagagagaggtgtttcaaatgcaggagcagggatgtggccacccttggaaattgtcaggaacatcatcacgaatttacctcagtctctaatctgcttcgaatctgtgtgtttccttccttctgtctctgtattgcccttgtatatttctcttttttcccctaatagtcatccatttatggttcctaagtttatttctcccccattcaagagactggccagtctgagactggattctcctattcccaatccacagttaatttctgaggaaggggttcattggcccagcttagtcagatgctcagcaggtcccatcgagggtggtccaaaggacagggtcactctaaaggaatacggttcccagaagctactgtaactgggttggggggtgggcaggggtgcaaatcccagaaaaagggatccagagctgagaatcaataggcagtttcttccaagcaacatgaaatctgctgtggttccttctaggacgtccattctcatcatttgcatactgatcacgggtttgggaatcatctctgtaatcagtcatttgaccaaaaggaggagaagtcaaaggaatagaaggggtaagtagctattgttgagggagggggtgggcaagaattagagaaaatgaaagaggtcaaggagcagatttcaaatgagtgaatgagagcctcttcatattgcctggtcacctggagaccaatgcagccagccatgggctggggtagatatctgcttgatggtgacaaggcatcacgagaagtgacagagggagcactggagctttcttaagtggatacatgtgtaggtcaggaaggaaggaggtcctgagacaaccacaccaggttcccatctgcagagccacctacctccccagcacacaaacttcgggctcctgtcgaaggaatgagcttctgggaccgctgggtaagcaggtatagaagagtctcctttttcatatacacaggatgttgccctgttgcccaggcttgagtgccgaagtatgatcatagctcactgcagcctcatgctcctggcctcaagccatcctctcacctcagcctctcaagtagctgggcccacaggcgcctgccaccatgcctggccaattttaattgtttattttttttaagacattgtcaagctctgttgcccaggctggagtgcagttgctcgatctcagctcactgcaacctccacctcccaggttcaagcgattctcctgcctcaagcctgatctttaggtctccccatccctaaatagagaagggactgtgtgcccacctttccctttagggcagcatcagagacatgactggtcagtaagacaaggctggtcttactgttcagagaatcctccagcatgtggcaaatatgccaacctctgaagtgtacacagagcagaaagaacattgcacagttgccactgtttggctaatagtagttttgcatttttctttttatgctcagaaatcacaggaacaccttaggcaatgaagagtctgtaggcataattaaaaacagactgcaacctcccttgggtatggaaatgtagaagaacaatatttcagaaaaagacagaaaaacactcctagtaacccttgctagtgatacaccaggatccatagccagaagaatctgaaatgcaaagcaaaggcttcaaggcctcatactttccctgggatattttgttcctgtggtcagaataggagccctaaaaaaagcaaagtagtggctcccacagcattcttgaccttttgtcctctagcagccttgggaactgtgaaggtggggcatgtggacaagacaatggctttctcaggtctgcccaagaccagcccttctggacacaattgtagtctaggtttttgctaaaaccattgtcacttttttaaggtgtgaccttgggcaactttatacttttctgggcctgtttccttttctataaattgagggtctcattttcatactccccaatatttttattcgttagttcaacaaaaaaggaccatgctagctagatgctggggatacaaagatgggcaaaagaaatgccatctgtgtccatggaacttgtagagggggaggaagacaaactatcacacatcacacatcaacacccaaatgtaacattgccaccaggagtcagtgctcttaaggaaaggcacatgatactatgaaagatgaggcagtagaactcaacgctacttctttttagcaagaagttgtacagcctgttgtagccatggcctgcttcctcaaactcgggcagatgaaatgtggcagcctgaaccaaggctcctagctttgacattcttgggctctgaagaagttcagctgtgttcacagaggtgaatgcaagccctgtgtaccaagccttcttattgactttcctactgatgggctttgcagtaatgatatctgatctcagccctgaaaataaacttgtgtttagtccccatgaaagccccatgacagagtttggaacttttgctgcagaaacactcttcaggggtaggcaatagatctcaactccattttccctttctattccccaacaaagtaggcaacactttgaagcccttctcgcgtgtcctgactccaaaggaaatggctcctactgaacagatgtgactgaagatttttttaatttagttcataaagtgatgctacaacagaataatcaccatgacaactggcccacacctcagagactgattctgatctcccaggaattctgaaggaccctctatccttgacaacaatcatttgcagccaggtagcaacggcggtagtcagaggagctatgatagaccacacccaagcaaggctgccctcaaataacatctcaagatcttagttcttatgcattccatcagtcagaagtgaagaagaggtggagaatctggattggggaccaggaaatcacttgtattttgttagccaataaattcctagccagtgttgaatgaactccaaggtatgagtaacttcttctagggtatcactgtaaaaatatttctggaaaagtttctttcaaagaataacgttctaactcatttctgaattggtatcaaatgctgcccaacccaaagaaagggagatagactaaatcagtggttctcagattcttttggtgaaaaggccattcctctcatccttaatgggaaacttccacctgactaaagggatgctgcttttgatcaatgagaaaccaaggtgtgataacttaagtgaaatattcattcaaatcaggaaatacaaatcaagaacaagacatcacagccatgggtgtgaatgaggttatattgccattcatgccagaattaccaacactcttagctcccacctgcatatctacaccctctctccccatatagggtctctcctgctatttctgggaattctcagggcctcccactcactgtctgtgctgccgtcatcacaagcctgcttttcattgtgttacgatctcttctaatgggtgtgctggccagcctcagtcctcaggatactcaagtggccttctggtctgagcagagttggaacagggaggttgtttgttgaaataattctgcacatgtcctgtgtgtttagatccagactcccacaaaatcgttcatgaacacacttccttcagcttccaccctaagtcctaattccccaaaggtagggaattcaaagctactcaacggcctgatgggaagggatgagggtgtggacaccacacctctgtgtttctgtacaacccacctccttgccagaggctcagatcaaacaacatcaaaagtgctctcttttcccttagccacaaaacagccccaattcctcccctgtggccctgtattgaatttaaacaaatgggatcattaacccaccagttctgcaaatagcaatacagtttgggttcagttaggacattccattctacaaggcgagatagcagacatagaccttccgcggcagatgaagacatctacagatgtcttggaagatttacattcacgatgtctggagaaccatttccctgtaggtttgttctgattccatgatccaggattcaagagctttgttctgctcttacctagcaaagatctttgaatttggggtcaatcatttaattactcattttatcctccagcaaggctggctgcataatgtgaagacaaaaaacaagacgctgtttagggctataccattaaaaaaaaaaatgggcagcttcaagaaaacaggaaagagcaattaatttgatatttcttgtacaagtagatagccaagtgacagtgctagccaagtgacagtgcttactctactcttgtagcgatgtttataaggtgctggccctgaactggaaagctgatatggcctctagcttcagggatggcagaattgtttgatgtcagccccaagtttgggaacagctgaaagctcaagaggcctccctgtgtgcacttcctacagtcagcgaacgggagaaggccattcctgggtctctgctgccctcgtggggtggctgccctggtggtgctgtggccacctcactgaattatctcccttaaacctgtttttcttctagacctgttcactcccacagagagactaattttttttttttttttttttttttttttttactcaaactgtcttccactggcttctccctcaaaatccaacttccaggagcagttgctctctctcagaaagaacatgctgtctggatcacgtcacctgactctttgcctttctcgtctccttgacaccataagtgctgtggggcggcttgatgtggaggccagatgcaaggaatttgaagtcagaggacttgatttaaatttttgttctgccatttatttttagccagatgtcattgagtaaattatttcatctccttggacttcaattttcttaacttgattttgcaaataataataagaattattattattaagacagagtctcattctgccacccaggctggagtacagtggtgtaatcttggctcactgcaggctcaacctcctgggctcaagtaatcctcccacctcaccctcccaagtagctgggaccacaggcatgcaccaccatgcctggctagttattttattttttgtaaaggtgggatctccctatgttgcccagactggtctcaaattttggggctcaagcaatctttctgccttggcctcccaaaggactggaattacaggcaagagacactacacccagaccccaaaatattatttaatgtatttttgaaagatctgtggtggatgcttctctcccactcctgcttcctttggtgtagactgagctccattaaggcaacactcctcagtgaccccccaccatgggaggtagagggggctatctgacatggcagactgggaataggaactgggcatacatactttctttcttcctcttcctcttttactcttttgggtgcagatttgaaagagcacatgagctcttctgcaactccttaggggaaggttgaacaactgcattgcttgttgggacgggtgggcttgctctggtgcagcttataactcagtagtggagttcagtattctgaacttctttgcagctgtagtataagctctattctccaatgttgaccatgttcataataaagatgatattttggtttctgtctgctcagtcctcttatttatatctatatgtttagggatcctcagtcccacaggtagcaatttcccctccccagaggccatcaccaagaccattcattgtgttttcttccagaggtatactaaatatatagatacacatatactctactacatgtgagtagagcatattcataattctgttcaacagcttgcaatatatcatagatatctgtttttattagaacatatagagctgcctcattctttttaatggctacattgcactcaatgaaccagtctcctctccatgtacaatgaagattttctcgatcttttgctgtttcagagaattgagcataatgtataaacatgcaaactctggagccagcctacccagggttgagttccggtgccactactactagcaatgtgaacttgggcaagttacttaacctctctgtgcctccatttctgtatctaaaatgagtaataattgtacctcacagtgttctgtgaggattccacgaatacatgccacgcacttagaatcgtactaaaagtgtaataagcctcagtaagttctagccaatttgattactgctgcagttcaagttacgtaggcaattttccatgtatttgagtaggataaatccttagaaataggattatttataaattcttagaaaagaatttagaatgttgttggctattgccaaatggtcttctgtggtagctgtaccaacgtgctctcccaccagtagtgtatgtgtgtcttggttccccccaagtcttgcccacacaggtagcaaactttttgaattttgccagtcttactgatagaaaaaattatgtaattttagttgtaatcattatttcccttattatgagtgaagtcgagtatcttttcatatatttgagccatttatatattctttcctacaaattgcccacccctatcccttgtcctttctattgagttgttcattttttcccctgttgatttacaaatgatctttatatatctataagatgctttgcaagtgttttctaagcttgtcatttgccttttgactttttaatggtactttggacttttaattgtactttagaagtcaagttaatcttttctggtttctgggatttgtgacatacattcaaaggcatgctctacaaaaatatttttaaaaattctcccatattttcttctagtgcttttatgattttttttactgttaaatttttcacatctgggatttattttcatataagaagtgaaatatggatcctactttattttcatttacatggttatctagttatcttgctaccacttattgaataaaccaatttctcccaaatgatttcatatgccatcttcatcatactctaaatttccttatatattttgatgtatttctggtctttaaattctattcaattgatttatttattcaggtaccattaacatattgctttaattagtgatgcttaataaaacaagtacttttagttagctactagggctagccttcccatataactttaattatttatttttatacatttttctggatttgctgtcttgtttatggtttacataggaaatttagagtaagcctgcccggtgaaaaataatcttattgatattttgttgttgttcacctttgggaactcatctgatgatatttttaatgggatttttatatgtgattattcattgggattttgggggaattaatgtttaatctttatctttggttctcatataatgttgttatgcatacctcttatgctataggatggaggtagaaatctccatttgcatagtgctttatacagtagggaccttgtgtttgtgtagagctcttggatgtatagaatgtttatgtataagatatttcatttaatcttcacactaaatattagtggtaagtgttatctctgttttcaagatgaaagacttcaggcttgaaaagtttaacaagtttgcctaaatgaatgctgctagttagtggcagagtttggtacctgcaccccaatcaaatctgagcttgtttccaagtgccatcacctttggtggtgtttttggctgtgaatgagctctggacttttaatcttgacctctggagaaggtggcaggaacagacaaacaaataataaagatggaggcagcactgtggggggtttgactttatttgaaatttttggtagattgttcatttggttgactcctcccaagttgattcatgatgctgggtgaatactctgtgcactgagctctgtaccacacactttggaagggtccaaggaaggcagtctatgcccccaaggggctcacaggctgtcagttcaagtgggagggccatcaatctttcctctggccaggaaaagactgaccattggtctccaaagatgctggatagcattgccagatcacatctaaacaactccgactgcagtttcacacaggtggtggtccaaaatttgtaaaaaagtgaaagtgatgtgtgaagatagggctgagatgagaggaaatggattcaagcctcattggaaaagctgagttagtttgttactttaatttgagcatagacaatggggtcaaagtctgcagaatggttctcagccaagtgattgctcttttcttctgagagtttgaaagttgtgctggcataggtaagtgattcccctgggatggatgaaagctgcagagggagaaaaaggaggaatgagtgagtccagtctggagcaaaaggttgctctttagaagcaacctgagcactttggtcaaagaatcacttgcccagtgtctggaaatcaataccaccattctagcagataatgaagagtatggaggggaattccaatgacggtagcccttcagtgtccccaaaacagtgtggtcatcttaccttggctggaggatctgagtgaggatctggggcctggggcttggagtgatctgccatggtgccagaaagaagagggacccatctcagcaatgggcctggggaaatgggaagcctctcccttcgatcttgggtgaagggtggggtggggaggaggtgttgtcaggtgggtggggggcagggcggaagaaaaatgaagggatttgaatcttcagtctgcagacagggtgggctaagcaggttttatcacactgcaccctcccctacctcctcccattactcactcatagctaattctagtatcaatggcagagagagaagggctgtcctatcccttggagaccacttacattttctgtagctctttatgatgaggaagataaaggctatcagcagcagtgtcagtagaaccccagcacaaaaggcaaggattaaatgttttttgctgttttggcaaagaaaggcaggggatgaactgttgggcttttgaaggcctttcctaaagagtgaaacctttcctgcctatggatggactcctgaaatggttttcacactgattaatgaactttcacccagtggttttcagcttttgcttttgagtttcacatccatttgaggcctcagaggaagctgtggcctcttcctctccccctccctcaacccacacaatgttcataattccccacccagcaaattttacctataagcttaggggatccatggatctcttgaagcttaggggatgccaaattaagagccatactcctgagatcacaaactgactttgttcttttactgtttctagtcctttctccccagtctccctgcccaaatccccaagccgaggctgtcagcacaacatcaaatcccacgtggtacaagatgaaacagataggagaatgctcatttacttgtggtggttagagagacagggtgcagggctagttgttggggctgctgtggagagagtgccttgtctttctacaagaaaacacaaaaggaattagtgtatctgtcacttttcatgatacccttccagcttaagtttccccaggtgccccattctacccaagcaaccagtggaaattaaggatggggctgcaactcttacaaaaatgagagaacattgttttttagattccaagtacttttaaatgaaaaatagaacttaaaaatcaactacatacatgaaatacaagcctagtgttcctttgattaaaaaaaaaaatctcatatgttgctctcctcaaagattttaataggaactcctgaagagatatgctccctctggcctaaggaaagcatctcccagctagggagaaacaacaaatgcttcccaaagtccttggggaatttgaccttgaaactgctgcccttttatgtttgccctttttgcagagcagctattagcagtgcctagccaaaaacagccacagtggttttcccaatgcctacaccacaaataggggagcaggacccacctagtttgatattgagcagagacaccctttactcagatttggagggccaggcaggtctctgtggttccccctttcacccctcctggcattaaattctgtgtcctggtaaaattggattcttccagtttcagaaatgcactagctagtgcctttccattacagcccttcagcacaatttctagttattttaactcagacgtgaggcaggtaattattcctgtcgtaaactcaccagtgtcgggtttacatgtggagccattgcttcccatgctgtcatcccctgagaataaaacaaggtatctcttagaaagcttggaagggagagccggcttaagggccagctctgagactgtgattgtcatataagagtagtaacaatgagaggcaatttgtgggtgttctagtgccatcagtggtcacagatcactcatcagtggttaacaattctggtgttgtttctgcagctcagcagccagccttcaggtt

SEQ ID NO: 818 - DNA, 481 bp, Homo sapiens
aagcctcaggctcttcaaggccctccgtcaagcaatgatgccatggtcatggatgaaaaggtcaagagaagctttgtgctggacacggcttctgccatctgcaactacaatgcccactacaagaatcaccccaaatactggtgccgaggctatttccgtgactactgcaacatcatcgccttctcccctaacagcaccaatcatgtggccctgagggacacagggaaccagctcattgtcactatgtcctgcctgaccaaagaggacacgggctggtactggtgtggcatccagcgggactttgccagggatgacatggattttacagagctgattgtaactgacgacaaaggaaccctggccaatgacttttggtctgggaaagacctatcaggcaacaaaaccagaagctgcaaggctcccaaagttgtccgcaaggctgaccgctccaggacgtccattctcatcatttgcatactga

SEQ ID NO: 819 - protein, 159 aa, Homo sapiens
  VARIANT (1)...(159): Xaa = Any Amino Acid
KPQALQGPPSSNDAMVMDEKVKRSFVLDTASAICNYNAHYKNHPKYWCRGYFRDYCNIIAFSPNSTNHVRDTGNQLIVTMSCLTKEDTGWYWCGIQRDFARDDMDFTELIVTDDKGTLANDFWSGKDLSGNKTRSCKAPKVVRKADRSRTSILIICILX

SEQ ID NO: 820 - DNA, 92861 bp, Mus musculus
  misc_feature (1)...(92861): n = A,T,C or G
tatgtgtgctgtggagggattgatgtatatgcatgtgtgcatatgtgtgcatgcatgtggagggattgatgtatatgcatgtgtgcatatgtgtgcatgcatgtggagggattgatgtatatgcatgtgtgcatatgtgtgcatgcatgtggagggattgatgtatatgcatatgtgcatatgtgtgcatgcatgtggagggattgatgtatatgcatgtgtgcatatgtgtgcatgcatgtggagggattgatgtatatgcatatgtgcatatgtgtgcatacatgtggagggattgatgtatatgcatgtgtgcatatgtgtgcatgcatgtggaggacagaggtgaacctccagcaccttcctcaagcaccacccagtgttctaagcaggctagacgggctggcagcaagcacagagacccttctgcctccacctccccaggcttgggattataaacccgtgcttccaggcctcagatctgccacacggctctgtaaaccaggcccaggtccttgcgtttgcaatgtgcattactgactgagcaagcttcccagccttctccccagcccagaggttttatgcatagaaaatgacttcagtgttttcatatataaaataaaaagggaaagaaaagaaactgtatccaaaatcatgacatgattgtgggatttatttatttatttatttataggttatcgtgacgtgtgtgtgtgtgtgtgtgtgtgtgtgtgtgtgtgtgtgtgtgtgtaatacaacctgatgagtccatttagtacatcagattccatttttctaattacttatctccagtgaagctggcatcccaaattaatgtagcttttaaaaataatatttgcattagttttttgagaatttcatacaatgtatcttggcatttccctcctagatctactcctgcctcctcaacaactccatactctctctctctttcttaaaggttcatttatttaatgtatatgagtacattgtagccgtcttcagacacacctgaagggggcatcagatcccatttcagatggttgtgagccaccatgtagttgctgggaattgaactcgggatccctggaagagcagtcagtgctcttttaagatttatttatttaaattatgtatgtgtgtacactgtaactgtacagatggttgtgagccttcatgtggtttttggaaattaaattttactccggtcagccctgctcgctccaagcccaaagattttattattatacacaagtacactgtagctgacttcagacgcaccagaagagggcatcatatcacattacgggtggttgtgagccaccacgtggtttctgggatttgaactcaggaccttcagaagagcaatcagtgctcttaaccgttgagccacctctccagccccacaatctgaactcttgcctgtgtgatgtacagtatcttttctatttaaagatttatttatttattagatggaagtacactgtagctgtcttcagacaccctagaagagggcgtcagatctcattacagagtgacccaccatgtggttgctgggatttgaagtcaggaccttcagaagagcaatcagtgctcttaactgctgagtcatctctccagcccgatgtacagtatcatgaggcctctgaatttgctccccaggactgtatcttgtcctcactatcgctctaatatgtttgctaacgtaatattccctttcaagtttgattatttatacaactagttgagcccagcagcagcacaaatgattagggtgcataaagccgtgggttcagaccccagcactaaaaagagaaggaagacaatgacgttttgcctaaacacacacgtaagagacagtttaagatgctgttttccaaggcttccaccctacaaaatgctccatgagattcaatttggagctgattaactgtatcttaaagcaggctcatctttcagggctcagcggggcctctctccccatgacttctgtgatcacctctgttttctctctctctctctctctctctctctctctctctctctctctctctctctctctctctctctctctctctctctctctctctctctgtcctttgcgcttcctcctgggtttctctttagatcccattgtcccagaggaaaaacaaaaacaagacaatcaaacagaacacaagatgccttgtatatctagtgtagaagagaaatcgtggctcaactctcattaatcaaccgattagcaagagttttgcccaagaggcccaggttctgccaggcagggtagagttcaccagccgctcactttgtcttgtaaataattacttagagtctgaggcccatgagctctgcttgaagtcttctggctccatcttctggattaaattgtaagtatttggagaaagaactgggtgaaagtccacagagcagggtgggactgagggaatgaaatcannnnnnnnnnnnnnnnnnnngattccaggagctcctgacccgttctcaatgatatcacccccatcccccactccccctacccccacccctgcccagccggcctcagggagactggctgggccagctgctgccaatctagtgttttatctgtggggtcatgacctgcactctagtgcttcctactcttccctgtctagacttgcagtccacggtctgacatcagttcagaggcgcccaccaaagcctctgacaagggccattacaatagccaagatgagctgaaagcaaacagatgaaagcagtaaaaattagaactcactcacccggaaaaggctgaaggtggatgagctcttattctaacatctttgtacacaatactaaggcagaaaaactcttctgattctgtgccgtttatatttagcggatacttcaatatcttgatcttttttaaatgtatagcaacaggcttttatgaagaaagtccatttgcactgtagactccgttctaagttaacttgcccttaggcaagggcatggcccctgcccttgaggtctgagaaaaatcacaaaatgtccctggaagtaacaaaatagacatagtagctgctgctagctgataacaacagagtgggctaagaaaacctaagtctttcctaggtcaaggtgctccggttttgatgtacgctccctccttatggtttaaccaggtgctgtaaaccaattagtttaaagaccttccacggaccgggctcaatcggcccccctcaattcgtggggagtcaggggttccggcaggtggacatagagtcggcgagaatggggtgacaaacagacatgacacgagagagtgtgttggatctgaatgtaatgtcaaattgagcatcaaactttttatacagtagaaaatagggaagttcggtgacacatcggcaaggtacaatgagattactggatgcttaatgactatcacacaaaacaggaatgcaaacacaaagactggcaggaactgggcaataaaacaactgagacaaggtcagctctatctaaggtcagctatattctaggaagccaggtgtgaggtctttacactcccagggcaagggctttcatgcccaagtcatggctctaattagggagttccgttctagctaaccttctcatgaataatgcaatactttaaaaccacagcttgatctaattcctaaaccattgtaaattcctgtatatgggagtgacttggcttttattctaagtgattgtgtgtggggactttctactaataagtaatgtagtctgccatacataactataataagaattctaaacttggggctggtgaggtggctcagcggttaagagcactgactactcttccaaaggtcccgagttcaaatcccagcaaccacagtaaccatccataacgagatctgacgccctcttctggtgtgtctgaagacaactacagtgtccttacatataataaagaaataaatctttaaaaaaaaattctaaatttacgttgctaagcttgccctgagatttctaactctatgtagtatatagtaaggcctgatttctttcactatctctcttacaatactagaggcaattctgaatgtcactgaataggcaactttcttaccaagaccagagtcagctcaaggactacctagggtattggtgaaggccaagaagcaaagttccattttgcttaggtatttggcaagtcattgcttggaggcacctataacgaaacaatactgaaaggaagcacacagatccattcaccaggacaaaattggagcatatgtgctatgggatgccacagttccaggagactaagtttccaagaaactcttctccttgggactgcttccaggtttctaaacctgtcaagcaagtcactactggagtggatgtagcaaagaccagcattcctttaccctctcaggtaacaccaaggcttagaaacacccgcttgcagttttccccctgcttgcagggtttttccccccgcttgcatatagacacaaataagtatacagaaatgcagataaatgaatgatggatagatgggttagatgtgtaacaaatttttgggcaccctgagttgccttcgagacaagtgtttgaaaaagaacaaagttaagtcgtcaagcaagttgacatttggaaaggtatcaaaaggtgtcactgaagccatgatagtgtgaccagaaactggtgagttgcagctggaactatgtgtgcacctatgcaggtcagggctgaggggctggaacatccctgggtgctgttctgagatggacccctcagcctgcttctccagcctcctgagctgctcaggtccacacacacgagagagagagacctctcacggtgctctgcgcactaagtctgagccagaacacaggacgcctttgttctgaatttgtatgaataaattgcaaacagtgcttggtgcgttttctagggcttccatgaccaaaccccacaggctgggcagcttaaacaacagcaaggcacttcctcacagcactgggggcttgaagcacagaacacttgcctgttgcccagacccctgaattgcaaacggtgccttctcctggtgacttcacaaggcctccgttctgtgtgtgctacagctgaaaactgttttcttgaaaaacaaaacccagaaggctgagactgtctcacctgtgccaccctggactcctagttaccttataactaagactgtccttggaattctattcctctgcctcctctccgaagcgctgggattgcaggtgtatgtagtattggaaatcaaagttgggtctcactgcaagccagacagatactccatcgactgagctacttgttcagcccctgagtagatagggtggaaaccctccgtaagtaccacgcttatttaactctaaaattaaaggggttacattaaaaacctcatctccaactgctgaggtgctgggtgctggggtgtctatgcctgaagttcagggaggggcttaattcagtgaacagttaagtacacttcagttatctagagcgctcgctcagcagtctggagtcctcatctcggctgttccacacgtgcagaaggcatctcctccctagccacgaggaggaagcggccacagaagtggaaactgcctcagatgggagatgcacaacaggctggaaagcaaaaggggcagagggacttctctagaggtttctgtttcccagtatgtaggtcaccatataaaccagcggtgcaggaactgagccaatcaaaatgaccgcaacagcagtttatagaaggtcgtattctggatcagagttttcacactgataagtctgggtggccctggaatatgtccattcaaaccccttccagaaagttctaccctgaagccacagcattagagatgatgagcaggtactttggggtctatgtaccccacccagatatagaaacaactccccacccaagctaattcactaaatagtctagacaaactctcccgtttattacaaattaaaagggtctgtttgtatcgcagttaactaaatctttcaaagagtatttcacaccagccagaagtcatggagcttgtttggagcccacttacgttgtagaaaaagaagactcatctaagttggccattttaaaagacaagaaaactgaagctgataactaatgcgttaaatttggcccaactcaggcagctggcatgtgttagagtctggccttgaactgagttttcataacctcatatcttcctgaccaataaggtagggcatcagctaaccaatcccaaacagtgctaagtttcataatagataaaatatgctagacaacataaaaacgtatgagaaaccacagcagtttaataggttttgatggagcatacagcaatgaagtatatacatggaatgtaacctgccttaaaatttttgaaataataataatatttgataggtgaataacaaaaaatgtagatacaagagcagatacctagagcagaagcaatggaaaaaaaatctactggcttacagtgccatctgctgctgggaagtggtaactgcattagccctccctggcagggtttttcaaggttggcctaggaaggaatcttactcatgctatataatatagcttgtgttaaacatgaatatggactaagggggaaataagtattgtagaactaagggaaaataaactgtagagaaaaagcatagtacaccagaaatggctctgctgccctgtggtaggaagccgcctagaatctttcaaataagaaagtgtgcatagtttactcctgttctgtggaccttacaagagtcctacgggttgtttgtttgtttgtttgtttgttttctttcctagtcttttttcttcaaagaagaagtgttatctttaattgatcatctctctcctacttttcccccttttggctaaaactcacttgctttggcaatttagctttcatacaaatgccatgtgtttttataaatcgtaggttttcagagctgggaaaagccctccagcctaggttttcgcattcacaacaattagctactctttctctgtgtgtaccaagatgtaccctgcctccttctttctctgttttctttttggcttcacaagaacgggggtgggggtgggggtgggtaggaggagttgttggattacaaacttcaagataaactctcctgagaagatctccatgtattaatttctaaatcagagccaagtggtgagtggggttagtggcttgcctggctttgcaactgtacacattttctccaaacagacaaggtaactgttgggtggaagaggagaagaaggcctaggtaagctgtcacagttcaccttgccgccacatagagtggaaggacgccagggaggaggaaagccctcctctgggtttatctgcctgcagaaaggattaactctgagggagcacccactttgaatgtagactttctccagccaaaggcagggggctcgggtgagacaagcaggaggaaggagagagccccctggttctttctctttgctttccagccatcacagagagttccttagctccctaaaccctccagccacggtagagtgaagcctcgagtcaaaataaatctttgcttctctaagtcgatgtttgtgtgggtatctatcacagccatgaaaggctcagcgaaacatagcggaatgcagcaagactttaggaaatcaatcacaagttgttttttctagaagcatttgtatacattaattgctaatgggatgggtatgagatacttggcaagaagcaaaagcagatgacattcttgtttttcagtagtcgtgaagagcaaatctactctcacatttcagagtagacaaatgagctctgccaaccgtgacatttacccaactagacaatgaaagtgctagtctcgggtcaccaagaggctgacatttgtcctacaggtctctgtcctatgccatctcccaatctccaaaccccctgcttcagctcttcctcgctcccaggcctttgattcaaataggatccagtagtgggcattcatagctaatgacggagttattagtcacaagttttctttcagggtgttttaagttttccttctgtatatactcaaatttttattttggtttgtctatttaagacactgtagatagggttgatcagcggagaagatgtagggaaggaatttccaggtgccttggaattatttctcccactctgacaccttacataagaaagggcactaaaagcattcagtggcacttctaagtgttacgacttgtgtcatatataaggaaacacatctaccacatggtattttctccaatgagcatctccagatagcacccatcaggaccaggtttcagggaaacacaaagaattgtcttcacactttgaaaggagaaaatggtttctgaagaccggtgtgcaccataaaagacttgagtaagagacatataagagactggtgcagatacgtggtggatgaaagtaggaggtttcttcaccaggtcattcatatatccagaggccaagagatgtgacaagatgtgacaagagatgtgattgtcacgcaaacactgccgttccttcttactcagcttctgccacatctcttccatggcttaatccacactgttactaagtggagccaaataagctgtcattctgatcattttattctccatgtctaacagagctttttggttctgcttcatctttattttccggcttcatcgatactaccgtaatcatcacagtaaatataaatatacatgctgtgtgtatttaagcctctccatccatcggttctggtactaatttgtttgagatgctgtggctaaactgtgctctttctgtagttgtgcaaatgtctacttgaaggggggactctaggggatgaattcagggccccctggaaatccagctactcgttctgagaagcctgcattcaggaatgttctgagagctaagagtgagaaggaagataattagcctggaagggattcctccccgcacagcagagatccattaaggatcattaccctctaaccactccctggttattttttaatataatatttgtactatcttttactatttctatacatacatgcaatatatcctgatgctattcgcctctaacttccaccgaattactcacacaagtctctgagaacatcccaaaagaggaagcagaaagattgtaatagccaaaggtcggagaggaccagagcgaaataatatcttctgaaacatgacgggacctctgcacttagtgggctagcagcctgacggtgtggaggggcaggtagatgggttggggcagagaaaggggaccgagaaggaaagtcctccgcagccctttttaaaactcctcacctcagcagcgctttggtgcccacctgaatgttgaagagaaaactgttcttgccagggacattcacactggatgtgcttcaaagggtgcccactggaaaatcagatgatgatgcaaagaggagggaagtgagcaccccacacacaaaagggagagaaagagacctactgatagacagacagagagagagagaggagagaggagaaagacaggagagagagagagagagagagagagagagaaagagagagagagagagagagggagggagggagggagggnnnnnnnnnnnnnnnnnnnnagagagagagacaggagagagagagagagagagagagagagagagagagagagagagagatattaaatcagtcctctgagggctttgtgttcctgggactcacgctggagaagattcagccttatagaaatagcagctggaatgatagacactgagccccttgacagagtgtcgccattgctgtctgatcttagctcaaggatgacaacagattgcaacttgatgcgcctggaagagaactggtgaacctttcagggcaggattcggcacacacaaagcaccacttacctgtgtgtgacacacccctgcaagctccccgccctcaggaatgatccctgaggcctcacttctaactccaggcgctggcaacgggcccaggcgtcgcacagtggtcaggagcacttcctgggaaccggtgctgcgcaggtgccacccccgctcccagcaggtcctcccagcctaaagccaccacggaaagggcgtgtctaggggaccagcgccctggacctctaggaggcgctgagccctgctcgccctgccgcccctcctgggccacttggcccggtcgccgcacctctgtcccgtgtgcaaggcgaccaccgccgccgccaatcccagatgccgggtaccatgcagtgcttgggcgccgagtacctggtaagagcgacaacttgagtcctgagagaagcggcctctgcgggcacctacctgcacagacaggacgcttccggctcctctgtcctttgggagataaaccactttctctcagtgacaccgctcctttaaagacacctggcactgaggacccagtacctgacacaagtgttgggctgaggccaggaaggcgcaagggactagggggtgaggggtgtcttacctctagtaagaacttggcccccgggggggtttcacatccatcctgcagagagctgatcttccccagtgatagagttgagttgctttagcagcctttggagaggtttcggttcggttgatttcacctaactgtttctcttgcttttctcaactctccgttttcctggaaggtttctgcagagaaaacaaggcaaagagaatggcgaccccaaatttatagaaaatgcaccgatacaccgtggctagtcttgttctttctcttttggactggtttggtaagtatggctgcttggcaggcctaaatcccgggtgtgtgtccagatacaagtgtgtcttagacgttactggtttaaagtttatgctgcaaggacaaacttctgtgattggtttagaatgaccatgagttaagaaattcttgttctgggatttcacaatctcctaaactctctgggaagactgccttcctgccggagaccaagatttattgggtaattccattaggatatggagaatcacagcttgcagcagtgcctttcttctttggctttgtaagctctcagagtggaagtccttttacatcatccatacccctcagtcaagtatttctcaacatttgctgttttctagcataggaaaaagtcaaggtctagaaagagactgcttttttaaaaactgtgtacacacagagttatacacacacacacacacacatacatgcacggccttgatctactgtgtttaacttgatgcaacccctctcatagcacacttgtatacacgatcgatggtagaccctaccagaccctgccgtgacatccgaggagtctctcagagctgagtcttgacacttattcttagagcttcattcactttgttcaaaggctgtgctaatgaagtcacccatgccgggttgggtcatgctgtgtgctgtatagttaatgattcactcaggttgccctataatatctacctgatagtaattacctttgttaagaagactttagtttgaattgactgtaaaaaccacatttgttctttccaagtaaaggacgcattcatttaatttttaactttccaaatggttttgcgtagatgtggttagatacacagagaaaggctgggcctggatgtgtttgttattgctgctgctgctgctactgccactcataaggccctccaagctctctttaaggagctcagagaagtctgtgtacctacctagtcctgttgccttccctatcgttggttgccatttctctccagttctgctgttatgtaaatatagggagcagctgtccctcctgcgtctgcagctttgaccttgggctgttaatgttatttaatgatcctcccttgcccctctgctgctcaaactctcaggctgcctagagagaagatcgcatatggcccttcccagcctaaagaattattagccggctgagacattgcacaccctgagctggaaactgcagagaaagtacactttgtttgtaagagaaatctaaaggtttccatatgcccagattctcttcactgtgttaggcataagagttcttttttagctgactggcttctttcatcttctgcaaaaattttagcttcagatacctgtttaaagcaggacaaggtatgtgtgtgtgtgtgtgtgtgtgtgtgtgtgtgtgtgtgtgtgttcactgctgcacttctgggtcttgtgatggatataccaactgaccaagtgtaggacaggattattactgatggtgctggccctggctggggatagataaagaggcttatgggaagatgccaggcttgcatccagagctgtccctgcaaatagaaaggacaccagcctgtgcttatgcttgtatgaaattcataaacagaaagcaagcctgaagctctgaattctccctgcctctacttaccctccagtgtcctctcccacctcactctttcccagttatctttcaacactcccgtttacccagacccagctcagagcaactgcatttgagatcacaacattccagcacacacacttcctatagctctgatactggagtgcctggactctgaggccaggagctggccaaccctagcttaacaaaagaaatccaggccacagggattggtgaagaagagtgtattcatttgcaggtttgggcagaactggagagcagaaaagttggttgtgtctttccaccttttctgttggagtctcagaagccctgaaaacagagccaggaaatactcctatgtgaaataggtggcgtgatagatatcaatgcggtgtgaaggctcttcttgggagccgtgggctccctccttgcagggagtatctggggtgccctaggaaagctttaagtctttgatgtccattttccaagggtcttttatgctgcccactctctctggtgtggaattaaaaccacagcaatggttcacagtagtgtagagagaactcaataaaccctagtccttaccctcctcacaaacttcccatagacgatatcacatgcgaaaccataatgcatagaaaatatgttgttattagataactctctagtgatataggcaaaannnnnnnnnnnnnnnnnnnnnnnnnnnnnnnnnnnnnnnnnnnnnnnnnnnnnnnnnnnnnnnnnnnnnnnnnnnnnnnnnnnnnnnnnnnnnnnnnnnnnnnnnnnnnnnnnnnnnnnnnnnnnnnnnnnnnnnnnnnnnnnnnnnnnnnnnnnnnnnnnnnnnnnnnnnnnnnnnnnnnnnnnnnnnnnnnnnnnnnnnnnnnnnnnnnnnnnnnnnnnnnnnnnnnnnnnnnnnnnnnnnnnnnnnnnnnnnnnnnnnaatcctgcactctagcctagaaggacagaagatatgccaaggttggatcaacttatcaagcaggctacgtaggcacactgagccatacttccgtgcactgccttgaaacagaaaaagagtgatcctgcctcttagcaaagatacctgttcccctaaaaatctcactaatgaaacccaggaggaacttgaaaagtgggaagggacaagggtctcctccccatatggtctacagttgataagtcctctttctttgggggctggaaagtctggtgtcctcccctgagccttttttccaaccttgactgaggacagagaaaccaatcaccatcatcagcatcagcatcatcagcatcagcatcatcatcatcatcctggaggctgaattttgagggtaggcactaggttttgtgtatctttgtgttccctagtaacagtctctggcatgccctgggcacctgaagaccatttaatactcttggttttgagaagggttttttttttttggtttgtttttgtttgtttgtttgtttgtttgtttgtttgtttgttgagacagggtctcatgtaacctgggctggccttgaactcggtcttaaactcctcctggtcttccttcctctgcctcctgagagctgggctttcaggcatcctccacctgatcaggttattgattatttttatttcaaaattgacaaaggaatgcagggcctctggaatacattggctttaaggcagtataactttggagtatgtgaccatacctcatgttagtggatagtgtcccgcagcctctgtccctgaataagcttgccggtaccatatactttcaggtgacattctgtatggaaagactggtaaacttactacccacactcttaactaagcttgtgtgaagagaagaaaccttggcagaggacgatcagatggatatgaatagtacagttgtttggactgaaatttcaaatattccacactccctataaaagtggagttacaaaacaacaataacaccaataccaacaaaataacaacaacaacaacaaaaaaaaaaacccacctgttgattgcaaaatgcccattgccaaagtgaatcctgaaattcttttttttcttgtaagttttttattttgtgaaatttaagcaagcaacccaaacactccttcagactgtgaacagtgtgttgatgtgtataggctgggcagccttgataagaaataaataaattttctaaagaaagacgggatgtttgatagctcaggcactaagtgttggtatttggagtaaaaggtcgtgaatttgatcagaggtggggacaggtgaaggcagatgcatctttggggctcgttagtagccagcctagaccatgtgttgagtttcaagccagagagagaccatgactcaaaaatacacacacacacacacacacacacacacacacacacacacacacgcatgcacgcacgcacacacatatatacaaaaaacaaaataaagacaaaaataaaacaaaaaccaagtggatattgcctgcagatcaagtcaaagttatcctctgaccttcacacatatgcatgcatatacatatgtgcgcccacacatgcaaaccacacacataagcacatgggaaaattttagcacagcctcagtgctcttagataacccaggcatgctgaagtgataaaatgaagttatcccaatcaagtttgtcagaaaaataaaaaggtgacagcctcttgaagaagacaaagaggaggggaatctgggtgtgctagggcatcctccctgctcacccgctacaccgctacaccgctacaccgctacaccgctacaccgctacaccggctactccagcattcacaaagccggaccctccctgagcagtgcagttgctgctggggaagggagggccgtggagatgcagaggctcctcatttatctgcttgtgtttcacactagcatctctagggatgtgaggggcagtggttttgctgtggccaggtagtcacgcgcccttgggttttgccaggtgttcatcatgggttattcggtggtggccggggcagcaggaagactcctctttggatatgacagctttggcaacgtgtgtggcaagaagaactccccagtggaaggagcccccctctccgggcaggacatgactctaaaaaagtaagtctttggggggttagggctccgacttagagaggggctttatttcaaaactttgcaatcatttaagaacttggcagtgtttcttatttgaaaccccggtcaacccatcttaaaaagcaagaagctgtagaccaggccaggcctgggcttacattcggcgtctgctatgtctcagctctgcgatctggctcggagtccccagcctctcggaggccagttttcatctttttaaactagtaattacgcctatctttccaggctgttctaaggatccagtgaacctgtgcctgaaccaaggcttagcagatgtttactgttcccctgacagtgtctcagactcagacttgtagtgtgctttaagctttggaggcaaaaataaaaagggaactggcggtttcctgggttggtggaagagtggggagggagtagctctttcctattggaacagtttccggaggctggggacaaggacggttgcacagaaccatctgtgcatttagggctctgaactatgtgctggaagtgattaggccaactggatgtatattttaacataattttaaatttttaaacaaaataaagtctgtgggcgtcattcacccaggaaatctatcccaccgtctctcttgtacaaacttcctcccatgccctgtggagggagagaggcttctagacgcttctgccacatgctcacccctctgtcagcccccagggttcttcctctgcattcctgtgactttagcagcctatatcctgagccaagccacaactgatgacaacagggagctctgcggctgagtagccccaggcaaggtctccatgctgtcctgactcttaagctgccttaaattcccaacctcagctcccaatggtcatttccctgagttctgccacgccctgaaatatatttgaacactttggagcagtttcccattaaggcacactatgggcagtttctagcacacagtgagcagtttaatcaatccttctcctcctcggtgactcttcaggtagctcctgttatattcccccacttctcagatgcagagcctaggacacgcaatgtttgctcacatttgaaccaggctcacaaggcgcccccggttggtttattaaatacttctttagatgcatttggctacaaagtttgccttcgtcctgcccccatgtggcggtgtgtgctacattttcaaagcccacagttacaccaatgagaatcggtgccctgaggcatgcttttctttcctccgtctttagacacgtgttctttatgaatgcctgcaatcttgaagtcaaagacaggggtcttggtcccacagccctctgtgtatccagctgtcctgagaagcagctggacactctggaagaggtccagctttttgccaacatcaacggtaggtgctgagaaccccttctttctccacatcacctgagctagcaacttgtagcgtggcagataatgtaacttatcgtgaaacactttctctgaaaagatacagagtatccacctctgcagcaccccttgtgtggaaaggaacaggagggttttctcatgaacttgctctatgtcatttgtgtccttatggacttatctgaagccctggctgctcctcacttcctatagtaaagggtctccctaagagactgaaaaggggacagggagacacaaggtccaaggttcacagtcaaatcagccacatgagggtttttttggtgaagttgggagggtcagcaggcactttccctgaccagaaagagagccagaagttgtactgaaaccacttggtccagatagttcagacttaaatgaattaaaaagtgaaagtaaaaaaccaatacaaggcaacttgtgaattttatctgtctggaaaatagagtgtgagatctacaataaatcatcttccggtaaccttcaaattattttgtgccaattctacagtttagtgttgaatttggggttttggagagaaagggaacctgagtccaccctggatggtacccctgctctttccatgagtctgggttatacattcgaatccctttctgctatggtaaaatggctgtgggttctttactggctttccaaggaagatggatgcaagactcaaaagcagcctgtgtgtgtgtcttctgtttccaggctctttcctgtgtgtgtatagtttgaattccttcaactacactcagagttcaagtgcagacacactgtgtcccaggctcccggttcctccaaggtaagagcttatgggccagtacttgatgctgcctgtacctctgctatacacggttaaaaataaaagggtgcaggtcccagtgagggacaaataaagaaggactatttacgatacacgatacatataataaacaatggcttgaaacggagacaactcagccaacagtaagggtccatgggatcttcagatgctagtgctgggtggtcgggatggctctacggtgaagaaggcagttgccacaaagcctggtgacgtgagtttcatgtctgggacccacatgatgtgaggagagaacccactcctgaaaatctcctcttctatatgtgcaccatggtgcacatcacacacacacacacacacacacacacacacacacatgtacacacacacacacacaattttttaagacaatgaaaacaaatatataaactatcaaacaaatgactttatgacaaggctaatgtacacttttccttctccagttcttggttactatttagagtgaaaccatcaatattcacactttcattgcaacagtgttgatagtctttgttgttcaagattgtgccagaaaaataggctgggggtctggagagaaggcttagaggttacttaacctctgagtacttgttcctcttgcggaggactttggatctattcccaggatccacatggcatctcataaccacgtgtaactccagtctcaggacatccaacagcccctttctgacctggactggcatcaggcacacatgggatgcacataaaaataatttttaaaaacatttctgtgtttttaaacattttaacattttaaacatttctactcaagttaactttattagaattttacacaaggttgtacactgagattttaaaagctgtttatatatattatatatattaaatttatgtatacaaattatataaatctatatatacataatattatacatttaatattatatataatattaaagcaagatataggcctagaagggcaaggcttcttttttttaagatttatttattatatatatataaaagtacattgtagctgttttcagacagacacactacaagagggcatcagatctcattacagatggttgtgagacaccatgtagtttctgggatttgaactcaggacctccaaaagagcagtcagtgctcttaactgctgagctacacttcagtgggtgatcccacatctagaagtatatggtcagcacaaattgcactctgtggaccaagagagagggggnnnnnnnnnnnnnnnnnnnnnnnnnnnnnnnnnnnnnnnnnnnnnnnnnnnnnnnnnnnnnnnnnnnnnnnnnnnnnnnnnnnnnnnnnnnnnnnnnnnnnnnnnnnnnnnnnnnnnnnnnnnnnnnnnnnnnnnnnnnnnnnnnnngaagtaaggaaggaaggaaggaaggaaggaagaaagaaagaaagaaagaaagaaagaaagaaagaaagaaagaaagaaagaaagaaagaaagaaagaaggaaacaaaaccaggacacaaggttatgtgtctagttggggagtggatctgagagaagccttggggaggactggaggtgagtataaccaaaatacattgtatgaaatcctcaatgaattaataaaagtgctatattaaaaataatcacaatcctccaactggttgtaaatacagtttgaaaaataccaagcttgaaagtcctaaagatgacaagcaggatttaaccccgtaggaggcgtaatcagccatcttgtagcgttcttctctaaaatgaatgctagtgggagggaatttggacaggaaaggattatctgcagagaaaggtactcaagtcactttcacagtattttattttttttaaatatggttatcattgcttgtcttaatgaaacacaagtgaaaaaaaactggagtagtttagtgggtgggaggaaattacattacataatgctggacacacgggtaatggggtttggaatgttgttgttgttgttgttgtttgcttggttttttttttttttaagcaatgccataaagtgtgcctgcagaaagaattgaaaggagagaggcagacagacagacaatgtgtattgtgtttgtgtgttgtgtgtatgagagagagagagagagagagagagagagagagagcacataccctccaatgtaagcatgcagaggctagagagactctggggtcatattctgacacaccatccacttctgagagacagggtcttgttgccctggagctcaccactgaggcaccatctctgcttctccagggatgacaagtgtgtgccaatacctccgacacaagttttggcacaagttccttgcactcaatactctcacaaggcgagcacttcactgcggactaagctataccacagccctgagaatggaatttttccaaggtttccatttagagttggatcaactgtcctctctctgtcgctgggatgacatgagaagcttacagggtggcacaggtgctgaactcagtgctgatttgtggcgctctccctccttgctgcttccttttgtaacctccggacatgtgctggtccgctggggcctcacagagggtctgcactgtaagtattgtcttatagaggagaagactgatcagggagaggttgagcaagcagaaatgttggcattccaaaccaagcagggcccatattggtttcttgaatccagtataagcaatgaagtccggcttggacaacctagtgagtggcctccttaagatcaccccacgctgggaggagaaaatatatcacatgtcttggagctacccacctcctctccttctgaagccagccccaaccttttcaccttccagtgcagaccttgccaacactaactttccaagtgcggacagaagaagtgattgactggccctttttggacaaagcaagagagacaaaaataggcttgggggcaccgtttccttctcctacacaaggaagcgtttgtttaagatggaaattatcatattgatcgtggaagagctgtgccaagccttaaaagctacagaacatgagaagcgtggccacaaggccaaagaacattttctaaatacttcttctgactacatcaattgttccttctgcctgcgtcgatcatggaaggtagggcaggcccttttcgagcagtgggtgggtttcaggaaggcatgggcccctgtgcatgagctctgacgagcaatgaaaaagtactacagaagatagcaatgcttttcgctttgatgatgtgcagagtgttagcgtagcgccatattttgggtcttccatgcatttgaaatctaaaaggtttgggatgctccccacagtcctgcccccaactcagttctagttctagcctcctgtttgacactgtgccatttgcttgagtgaaatccatatacaaatgtacccacatttatccgggcagccgatcagactacttcctgcaagttggagtggttttgctggtggtgatgaaatgcagaaatatggaagaaacctcaggctgtggtctaatgcaactctggccaaattaatgatgagcattttcagtagacagctaggtaggcacccaacataaaagacccgatctttacatgtttctctgtgcccccttcaggataagatgagtctttttgttattctgtatcagcacaggattagtgaatcacataacacacacacacacacacacacacacacacacacacgttagcaaagtcacatgcattaaaattaaggtctagtgtagaataatatttgcatcaaaggagtaaaatagcattaagtctgtgtttgttcttagtttttagaaaccctaatgaaacttaagagtacatttgcttttaaaactcttccaatttattggtgttgtgaaaccatttagtggcagcaaagcaaaagaaagtagaggtttagaaatcagaaatcgggagtaattactagtctgtagaggaaatgattatagacctgggaaactaagagaaccaactggaaagcccctgtgggcaacaaagaactcatttgggtggcgtgggatcagctagtgtactgaaatctacacattcgtgggtttttaaaaaaaattctaatttactacagcaggaacaaagatcacataggaagacatgaaagtgcctagaaatcaatttaacaagaaatatacgcgaacctcaggaggaaaacatcagtgccatcttaggtgcactgaaaaagaaagcaagcagaaatatgctctctgtcaatcatacagtccaacatggacagactcttgtctattggtctattagtttatcgttctggcatcgtacagaccaacaggatgagatccaaagctgggaatttattgcacgataaaactggcattgtaaatcaatggcgaaatgtagactatttgataaatggtattagatcaatcagggagacatccaatggattggcttttttttttttttttttatagaaaatgaaaccagaacatattagaagctcacaaggattctttcacaacctgaaagtagggaaggcttctagctcctaccgaaaaccaaaaagagacgggccatgtgtagaagcccatgtctgtcatcttagcactctcagaaggctaaaacaggaggattgccataagtctgagtccagcacgaaataagtaaaattttaatttggaaaagaaaaataagaaatctggttagtattatactcgatggtgagcagccgatgctttgtgattaagatcagaaagaagagagggtgtctgttccaaacacttctattcagctctgaaacggaaggaaaggtaacaggcaaggaaaagaaacagaggcgagagggaaagaacatgtttattttaaagtgagtaactgttctagaaatatccaaaggacctataaaatattaagcaaattgagcaaagaaacaaaacacgggtcaattgtctttctgagccaggcatagtggcgcacgcctttaatcccagcacccaggaggcagaggcaggtggatgtctgtgtgtttgaggccaacctggtctacattataagttccagaacagttaggactacacacagaaaccctggctcaaataaacatccttttggattctcatagcaaaataaaaaggtttcaaagtccatctttatcaaaatttttaaaaagaagaaaacttagaaataagtttaacagtcaaaatccatgaccttagctgaaaagaaagaaaagaacttgtgcacatggataaagacatctgttcacacaattaacttactatcaataggatggcaactctcttcacgttgctttctatgcacacccccagtgacttttgtggaaattgacaagtttattctaaaaacataaaaacgataaagatgtaggtgttatcatttatggaatcattgcaacatgtcttccttaactcatgaactcaggtgaaggttctgtttgaggagactgtggaggctaaggaaacttccagagaggggacctcgctaaaggacgtaggttgctagaagtggaagcttgcagggtctcttgtctctggccccttcctgccttctgctccctgcttcctttctcccaccacttcctgtcgactacacggtgaagaatctgctctaccacaaacactctgatagtctcaagaatatgggagcaagcaaatgtggactgagacccctgaggtcatgattcaaataaattcttctgcctttgagttgtctatgtttgttcaacctattgagtgagtgtagacgcagccatagaagacacatgaacagggctgagcactggctcagtggataaaggctggctgcataaacataaagatgagcttgactcttaagaactcatgtacagctggatgcagaagaacacccatctgtaatcccagggcttctgtggggagatgggaagtagagtcagaattcccaaagcgtatggccagctaccttggtgaattcaacaaaaaccaaccaagagaccgtgtctaagacaagacctgaggttgtcccctggcctctacaatgcacatacatacactaaatgttttaaagaataaacattacttttaaaatgcatgaacaaaaggaccaagatgcctttcaataaagctttaggtatttaaaggaaaaaaaaaaaaaggcagcaagtcacatatgactgatctctactgtcaaataacaacacaaggacgaacagctcagtagaaccaggcaaagacgtgagcagatccgacccatgaggggctccacacacttactacaagagttagttatttacaaagtagtaaagctaagaactggagaggatatgggaccagaacaaccacatgtatgtgtccaggaagaaagactgtgaatggagagactagtctgaaaagaaaaaggcttcttacacagttcagcatacactcgccacacgacccagtcactccacttttacatctttacctaaaagaacgaaaattacacatccaaaaatgattttatatatatatacacacacacacattgatatttgtaacaactcaaatggcagttgtgatcgtgtgtatatgctcagcccagggagtggcactattaggtgtggccctgttggagtagggttatcaatgtagatatgagctataagaccctcatcctagctctctggaagacagtattctgctagtaacctaaagatgaagatgtagaactctcagctcctccagcaccatgcctgcctggatgccaccaagttcctgccttgatgataatggactgaacctctgaacctgtaagccagccccaatcaaatgttgtccttatgagagttgccttggtcatggtgtctgttcacagcaataaaaccctaagatgctaagacagaagtaaaacaaggggtggcatatattcactgagggtgcagtgctcaggtattggaagcatattgatgtgaacaactcccaaatggaaggaacttgacacacaggtgtgtaccacaataccagatggtgccagaatcaaatccaagttgcattagtagaagtcacatctgttgagctagagatgcagccaatcggtagagtacttgcttggcaggcatgaagctgggttcagatgcccagcacggtgtaaaccaggcatgacgggacaagacagtaacctagccgaagaatccggagcgcatgatcatcctcggtcacatgagcttgacagcggcctttctctgaaaacaaaaaatcagctccataggagaatgagggcacttacacagctaccaaaatgtcccgcaaccaaatcaggacccagtggttcacgcctgcagtcccagcacacagaaggtgcaggtggaaaaattccaagcttatggcctgttgtttttaacaaaatctcaaacattcgattttaccaatgaagaccgaggagccaggtgctggggtaaaagcctgcaagcacagagaggtagaaaaagcacccagctgaccttcctccttagacatcccaaaacaaagcattccacctccgcattgtctcaaaatcccctcaaaccaagcgcccctcccttctacttcctgtgtgtctctctatccatcctcccgacttcctcttactctctatggtttcttccggtcattggttcctctatggttcatttcctgtcaacttgttgcttgctccgcctcttgacttatgattgactttatttaatcctgtttaaaataagcagaaaattcttggattaaaggtgtgtgctagggatgcgcctcaaaactaaaaacaggtttttttcggaaaattacacaatctgggattcacactgtgatcaaataccctgcagcgatggccaatattggctgcataatgagataatgagatggagtagataatgagatggagtagcagttagtgggggtttggggtggtcctatcattgccttgaaagggatagtggttatatgaaccatatgtagttgccaaaagtctcattgaatgtttcaaattctaaaacagtaaaacccagaaaatcccaggggctagagagatggctcagagtttaaatgtgaatattgctcttacaaaggaccttagttcaattcccagcacccatgttgagtggctcacaagcaactataatccagttccagggagtccaatgtctggccttcccaggcacctgtactcacctgcacacacatacacatagttaaaaataaagtaattcttaaaaaaaaataggaaatcctcatattctgatatgcatagagctgtcaggcacactattaaaagtaaacaatggatcagtgtgtagtgtgctgcctttcgtttgaaaggggttgaaatgtggtatgatttatgtgtttacagatgggtaacacacagatctatgctcgcgtatatgtcatcccatagccattacatactgcaaacaaaacacaagtcatagccacaaaggatttgaactttttttccttcccttctgtgtatttaaatttatttagtggaactagtcagtcctccacagtccttgctcttgaactaaacaggcagagtcttctctggttgctcttaggtactgaatgttttgtattctccagtgtggctactcatttgggcagtcctcttcggtactgagtggggcagtatgcagcctcattctgctgaggcccccactgctttgacatggtcagtagaacccaacgatgtagacccagacccagcacgtggagcacatctggacctcagaaagccgtcacagacaaatgccaaagactagaggatgaaaagaaaaaacaaacaaacaaaacaatagccttaatgaagttatcaaggtcaattcacagtgatgttgcctcaccagctaagttcgctggtgggattttacagaaaggacatgtcatcttacagtgatgccttcccctaaacccagactggcagtctagttatgagagaacagcagggagagtctacaagtagagagggagtttgcaaaccacccatcgagaatcttcagagatggcaaagttaagagaaacaagaagttgttacagaccaaaaaggattgtgacaaccagatgtgacctgatatcctgagttagatccccgaacagagaaaggacactggtggaatatcagaggcaaaataaaagctgtagtttccataactgcatactgccaaggctgaaccctcccaaatatgctgtgggcatgtaaagtattagcatcggggaacacaggcagaggatacacaggactctctgttccatttctaaggcttttctgaagctctaaaatgattccaaaattaaacatttatctttcaaaatgctcttctcatcaacttccaaccttttcctgcctttgatgtggatgttggcattaagaaaaggctcgctcattctcccaccgctttcctttgttttggcaagcttggcatagtgaaacctagcccttttttttttttttaagtataatttctgttatcttgaggtcaattgcaaaattccatttggatttcctatcacatttccataggctttcaaatatatctaaaataaggtgcatgaaactaaaaacagtagttgtctgtggacaaatgtgctcagcggctgcacacaagaaagatttagtccattggaccctctagaattaatcatgtgatatcctaccccttcaaaacttcaactttaattttctgtcaaatcactacctggtgactcaagaactctttttctaatattgtgaccacccgaggaaggttctcccagccatccatgctggacttcagtaggagcttcagaaccatctgctctctcatccccctgctccttctttatacatttcacaaaatggcggctgtctggtttccaacaatccatgagatgatccaacgcttcatagcctaggagtcttaccccattgtttggggcccagagggtcatgggagaccctatgaaggtatctgtggttcttgaagattctttaaaattgatattgctatgtgtattacattttagagaggatcccagaaaagattagctttcacccaaactcaagatccaagtcaaacaagcttggcttcactttctgaagaggatagaagagaatctttactgtcattagtatgacttctggttgacccagtccatccccccaactattccttaaagaaatgtcattattggggttagcaaagggttcagggagtaaagtgcttgctgctctagcatgaggatatgagttcaaatccccagcacccacataaaggctagccacaggggtgtgcacgtattacccagagctgggagacaaggacccaacactcactgaccagccagccaagacgattggtgagcgccaggtttcatgaagacctgtctcaagacggtggaatgagagtgggagacaactaagactgtcttctgacctacacacacatgtgcacacagaagcacatgcacatgtaagcatatacacaatcatgtacatacaacacacacacacagagagagagagagagagagagattgctagtgtttgggcttctgtgagttcccttaatcagtttctcaccacatgtacatgtgtatcaggcaatcgctgtaggaaacagtgatttttttttttttttggctgcctatctttctaactcgtgctttgcaagaaagctgctaaacctttctctcttttttttttttactatttaagttgtgtgttcgtgtgtgtgtgtgtgtgtgtgtgtgtgtgtgtgtgtgtgtgtgtgtgtgtgttcaagcatgcagaagtaggtcagatgctataccacatatgtggaggtcagggaatggcatcctgattgtctttagagccaagtaagcgtctttacctgctgaaccatgtcattggtcataaagttctttttataaatactgagcttatggtttgaggatgttggaattttgaatataaacattttgaagagaaatgatgaatcactttaccatggattctgccttttcttcccagcaagccctttcccttatttaaccggtgcatccctcagacacccgagtgctattccttgtttgcatcagtcttgataaatgatgcggacgctctccatcggattctaagtggaataatggcgggaagagacaccatcctcggcctgtgtgtcttcacattcggtaactctccgttaattttatttagcaactgtgtatggaatggtgaatttcccagcactcaagtacatagtgtaatgaaattcaacagctttgacttaaatacagagcctgtcgatttcctttctagatctgtcctaaggttcaaggatagacagggaactggaagagtggaagaccagttgactctcagccaggcagctgcactggggagagctgagttaatatattggcctggtcttttgttagctatgcataagagagaggcgaataaaacactgtcactttatacaaagtgctagcatccagggaccagacacgggttctgctagcccatgtgccttcatttgtcccttagaccagaaggctgttgagtgggaaaaggtaggaacttgtgttctgatagtgtcagatacaatgcccagggtgccctggcagagacctactgacggagctgagactctgacccaggtctgattctaaatcctgtgttagtatccactgtacagaagcatctataagcagcccccttgttttatttggaagaattagtgttcatagtctcagatattcagaaaaaccacaatgctaaaagcccaactgttagaaaataaaatgcaataccttatatacccagtttatttaataattataacttcagttgtgatggatgatggtggtgcgtgcctttaatcccaagacttggaaggcagaagcaggcagatttctgagttcgagaccagcctggtctacagtgcaagttttaggacatccagagctgcacagagaaacctcatcccaaggggatgggggatatttttgtaagtttgattgtttttcattgtcagggcattattcattgagattttacaaaagtatctaagagcattgagagttagaaccatacacagcctagcacaaaagacaaaagactaaattttaaaagttaatttggacttgtaggaaaaatatgatttccgggtactgtggaataattcatttacttattcatctttagctatttaaaatttccaagagtgctagcctttcagaatctacttccaaagtaaacttgtgtcactggcctagtgccctgagtatagtttgccggaatacttggctgttgagtaaacctgtcagctgtcacttctctgggcttggtcccatttgatgctcagcacccttcctccccaggcccccttccaccctggctcaccttgggcttcatgttctgtgcttactttccagccctgtctctggccatgttgttcgccttccggttcatctcgacccttctgatccacattatcatctccttggtcattttgggattgctgtgtaagtatttccactctttctaagtaaatgggacatctttccattaagtatagaatgcaaaggatgtttggttggatggttggttttgttgtttaactaactacagtcatagaaggggacacagtctaggcccactctttcacatatgaggaaaaccaggcccagaaaggagagtgggagtcgattctgcctcctaaagaaagttaatgcccaatctatccttgacgctatcccactgagtcgctcctgagaccagcctctgacggagtgaccctggagcccacaacgctgggctgcggatacagctcagtgctagtcttaccaagcatgcacaggacctgatgctcaatccccagggatgcaaacaaacaaacaacaaaacaaaacaaaaaatgtgttttactgatactcctatacactgtagggaagaattccagctggccatggtgaggcacccttgtagcttcactacttggcaggcagaggcaagtctatgaatatccatgagttcaaggccagcctggtctacatagcaagttccaaaggcagccaggactatagagaccttgtctcaaaacaaacaaagaatgaaacaaataaaaaaaaaaagtttggtgtggggagatagaatgaagaaattcaaactttcttcctttttttaaaaatttcattttgaaggatttattctgtgctacacttgccccttgggcctgtgagaacccatggttgtcacacaaaggctcaggtcagtctgcagggcaagccagggaaggagcaaacagcaggggagcctggtatatgcctctttccttaccaatcaacggattgtgaatatccccaggagctttggggaaagaatgtctgagagatagaaaccctatttttcaactggtttaggacattttaatttcaaatgaccaacatgactgcaatggtataatgcccttaaatagtcagttctgttctcaggcagccacacagagccctgagttcctgtattagtcacctttccatttctgtgacaagataccttgcaaatcaacttaaagaaaatttgtttggactcacaggttcagcgacttcaatccatattccccgggcccccttgtttctgagtgtataataatattctcatggttgaagcatgtgatagtctaaatctgattgcctcatggccaccaaaaaaaaaaccagaaagttagggtcccagatggctcccaagagcacatctccagtgacccactttcttcaagtagatcctatctcctaaagtttcttcagcctcccagtaatgccaaccagctggggaatctagccttcaacacatgagcttctaggggtcatttcagttctaaatcataacaagctctgtactggagaatggccattgtgactaggctctatcacccaccttcccgttcgtgatcagtagaaagctatgacctccctagagttacaatagtgatggtttctggtcatggctttccataatccagagtgtttgcagcatcagtgggactctgataacctgattctcatgggccgtgtaaaggacccacctctgtgagtataaagccaacctccagcccctggccccaggggctgtcaccagcagaccttatgtgaacactttaaagtttcgagtaaatgctgctccatcattctatttggtgccaccccttcctgatcacgctcagactcatcctgttggctaggtccctgtgtctgcccaagaccagtaagtagctaccccaggctggacagagcctctgcaggctaacctggcttggcacagatcacctagagataagtgccaggctaccaagcttttgaggctataggatccactgtttgggcactgttactgggtcaactataagtggctggacttacagtggttgtatttgtgtgtgtgtgtgtgtgtgtgtgtgtgtgtgtgtgtgtgtgtgtgtgtgtgtagaagaggtaatctcaggacatatgccatgcctgctgttgctttattttctagtcgtctgcggtgtcttatggtggctgtattatgactacaccaacgacctcagtacagaactggacacagaaaaggagaatatgaattgtatgctagcctttgccatcatctctacagtcgtgacagtaagcgttccaaagcaaccctagggaggactatttcccgagagagctgaggtcaaaggattagtggtggataaggagagagttaggggttggggggaggggggtgacagacacaaaccaagaagcttgaccaggaagtgaatggcagagaaggctaagcaattcgtgggtgaagggcagtggattccttaacctggagacttaaactgtttctatgcagagaggggaaacctagtcgagatggcatagcaagtagattttagatgtactcattgtccttttacgtcacgttctcttatctattcgtaacccatctctgagtgtgtgatgcggaggagggaaaatacaagatgtctcttttacccttaaagagcctcagtctcaccttctcctactcttggctggctctttaggagggtgtcaggcctccttcactatgatgactgtgggatctcacacagggacccgatcatagttggggcttagttcatgattaggaatgtagcagttcaggtgtaacagaagcagtgactatccacagggagggctacttgatgagacactggttacagggttgctttccagccccgcccctttgcagaggggttcactctgacctctttctcaccaggtccttctcctggccttgatttttaccctcaggaagaggataaaattgacagttgagcttctccacgtcacaaacaaagccatcagcagctgtcctttcctgctgttccagccactgtggacgtgtgccatcctcattttcttctgggtcctctgggtggctgtgctgctgagcctgggcactgctggtaagtggcactattttaggactgtcagccgattcctgtgagcacgtgacctcttgtgcaaccagaggcatctggaggtgacggtgagggagccaggacatctgtcttgggggaactcttttgtattggctttggagaagctgggtttcatgagtaaataaattcagtcaggcttgaacacttaggcaaagctgtaaagctgataggaagacttctgtcaaatgttgtcaagtctggggctagagcatataatttagtaggtagagaccttccctagcaggtatgaaagcctgggaccaatcccagtgccttatcaacagggtgaaatgtcacatgcttataaccctagcattcctgaagcaaaggcaggaaaattagaaagtttcaaggtcatccttgactacctaggaagtttgagccagtcttggctacataagaccctgtctcaaaacaaagaaacaacaacaacaagtcttcaggtttaaaccttttccaaggtgatttgctagctcctagcatcacagatgacagaatccagggaagactctgcaagggaggtattttcagctaagcgagtcaacagttaaaacaagtatatgaggaagttaggattgctttgactttgaaaaagcaacagtgtagcctccgttctgcctgctgtatcccatggctgcttctccaccctggtctttctcagaatccttccctgctttcccacaccaagatgtggaccaggcattcagagcttctggcctgatttgatttggggtaggacaaagtagatgggtgggtagatggatggatgaatgggtggatggatggatggatggacaggtggacagattgggcatagctacagagacatgcattttgtcatgctccccaataggatattcacactctatgtcagtgtcaaagggccatctgaaaccaagcagagagcttatgtcctggcacgtcactctgctgttgccttcgatgatgatgaggttctgccttgaagaagaaatgtagcggcctgggagtcagtgcagtttaagggggttgccttgcaaccacaaggacctgagtttgctcaccagaaccggactgggaaggcagagacaatcagatctgagactggctggctggtggatagcctggcctacgagtcaagtcctactggtcaagttccagcccaatgaattagatgatgcctgaagagtgacacccgaggctgtctctggtctctacgtgtgcttgcatatatgtggacctgcataaatatgtcacacacaccacaccacagcacagcacacgtcagctggaagaaacaacttgctcagtgatgacgactttcctttagctttttagctttagctttaagcccattcatccttgcagagtagtaacagtgtgtgggcaagcggttggtctgtgaaccatgcctccggggagatcatcctgaaaattcggtgactccgctctttgatttggtgatggcccaattcacaccctgtggcaaggacgagcaccaagttgcgtttacgagcctgttaccggacaggtaagagcaagagtggatgttacgcaataggccggtgcgattccctaatgtgggatcaagcatgtcttcccccttacttcctccattcagtgaggcaaaatacacactcctgagcaactctatagcacagaccacaggctcgtgtcccaggacaacttcagtatagtggattctttcagaacttgcctcctcctctgccaaagttgagtggccctttggaattaagacgctcacaggctccttggaaagcccttggagacacacttgtccagcttccaggatgtggtagaagcaggctcttctgcttgggggatctctgaaggcctccagtgaatgcccagcaactgcccagagagtctttgtggtgccggctctatgtgctctacttggtcaagcagacagactgtaatcatcagggtgaactttgtgtagaaagaagagaaagctgaaagaaggaaggtaaagtagccaagattgcagtgccttcaggtcccacaacctctgctctttctcgtcacttcatagttggaagagccgcctgggctccaaccactgtgtctcacacttcagcctttaggaaagcgacaggaaggaagatgagtatccttcctcagaagacatgagctgtactactacctacccccaatggccagagccaagggacatggtaacacctactgctaaggaggatgggaaatgtagtttccatttggcccgccatgcacagctaaaaacttacagggtctattacccagaggagtgggaagtctttattacaagggcacttgagagcctttctcgagctcagtgtagtctcagtgctatcagaagacagagcagtagccgtggcgcacaaaggggagaaacaaacaaactcttgcctctacctacctcacttcctgaacaaagtacccaccctgctgtgcaagtggatagggtggaaattgccaagatatcagaatacactgaaggagccaaaccaggctccgtgcaagtgaggagaggacccggtctcagagaagaaggaaaagacccaatcctgagagttgagaatgacgtcatggaattacagccccagtgctaacttggaattgagctcctagctagacaccccatgacattctcctgcgtgcgcccaaacaagagcgccaccagcctcagccaacaaggccccagagcgaaggcaggaaggcaggaggtcattcttcggttgaaagcagcccttttccccctcagccaccgaatggtgtcagaacatgatcgttttctgttagggcaagggctcagttggcatcgacgaggagagcctaggggaaagaagcgaaaactgagcgtctagaaccgaatgtaggtctccaagtaagctgatctttggcttcacagtagagcaggtaccacaaagagctaccacctgtcctccctgctagagcccaggactccctcctgccacctgaccctcctgtctgcacactcaagggctgcccaagaacacagagtcccccattgttccccaaggcctcttcatccaggatcagtggcttcgagccaagcaggccagcaactgcatcgattttttttgactctaggaagatgccccagctgtgcctctgagaagggtgaactacttccacatcttgggaaaggatgcttgccagaggatgtaggtgaacagtgcacagtgcctccttatgtcatttaatgtcctctcaggcaatgacatgaggacagagtttctctgtgacctacactaaagttgtaaatgttagggggtatcctcagtaggtaaatatttgtgagctttctctgggaataacagttgaataagttaataatttaatgtgggggactggggctcagtggtttagaacactagctgctcttccagaggtcctgaattcaattcccagaaactacacggtgactcataaccatctataatgggaactgatgccctcttctggtgtgtctgaagacaattacagtgtgctcatatacataaaataagtaaatagatcttttaaaaatatttaagtgaaaaatatagtgacttttggcaggtcatgctttctcacgtaagccatttctccagtgacttagttcttctgttaactagtttgcaaagacgtggggtttttttggagtcttctcagcaaaacattcctaacagtggtgacttcctgcctactaattcttatccaacaaaataaagaggcctgaggtggtctatatctgtcactcccccactggggaagctaaaactgaagatcagaactcaaggtctaggctacaaagagagaccctgtctttaaaatccagaactcaaaataaagcaaaaagtgaacattgtagctatccagcaggcgctgtggttgaatggaaaagtggcctgatggtctgggtgacccctgatctctaaggtggtctagcagccgggatgggagaacaatagaaaaggcccagcgcaggacaggtacctccaggtcccagctctggctgaaagggacaatcacaaccgcgtacacagtgtgtttagaaggctcagacagggtttcccatcaaaggatctgggatccaggctgcttcagattccctggggaattaattctctgtgcttttccccccatgccatccatgcaatggaaaaatgatgagaggctgggctggaggagagctttgccttgcaaatgaggggccatatgttgttgatgttaggaattagcgtccagtaggaatgtctcctgctagcctcagctgtgtgtgttatttgtttccctcctctgctatgcttggtgaacttgagaacatagtatcagagaaatgtatcagcgatctagaagataacagatgattttactgagcctcctggtgggtggccgaccttgttgcaggaacagggtgtgagagagaagtcagagagacagcagtagcccttgcctttcagaagtgcaggtcatttcacctctgcagagaaaagctgtcccccatgcattgctccatgccttgctccagtgtgagccgacctagaatccactccctttcccaactcttaccccagctctccgccacaaacggtctccgaagctaaggattttttttttttgttttgagatagggtttctctgtgtcttagaacttgctctgtaaactgtccagcctcaaactcacagagatccacctgcctcagcctcccaagtgtcagaatctaaaggtatgcaccaccactgcccaaccagaagctaggcattcttagaatttgtttctagtagtctatttcttggatggttgtctacaaatcccttgggcacgtatacataagtatttcttgtacattttttttcatattctcccttcttccaacagatactcattgtctgactatcatgtgctcagctccagagatgtattttgtgtgcctactgtgtactttgggtacttgaaatattttgataagtcagtcaatagtcttttccaccaagaggggcaaatgtatcatatgtcccaaggtgctcatttctatgaaaaaaaaaaatgttgttgtcttagttaagatgtctattgctctgataacgcaccatgaccaaaagcaacttgtagtgggaaggatttatttgggctcaagcttccaggctacagtccattattaaaggaaatgaggacaggaagtcaaacacgacgagaaccgagaggcagaagctgatgcagaggctgtgggggagtgatgcttactggattgctctccatgacttactctgcctgctttcctatagcacccagggccaccgggtcaggggtgtacctcccgtggtgaggcagactctcacatatcaaccaccaatcaagaaaatgcacatttttctctcttgagattccccctctaagtcgagctcatgtgaagctgacataaaactagccctcaaagttgttatccaccagtatagaacccggaagggagggacatcttttttctttctttgtcccttggctcggtatgccatatccggtacttgactgctggacactggagacaatggaactttcctcttatttttccctaattgtcctgtaaccagggcagaggcagaagccaagctgagggtcagaaggctcgaatcagtaggacccgtgggccaggtttctggaaaagctccaagaaaatatacagaatgtgctagaaaatggagtcttttgaaattgtgtctgctcccttttggatattgtcctacccagctggcctgtcttccttaagaatctgccatctacagtgatcagtgtaccactatagactctagaaaagctttaaaacgtgcctacaacatcaaggctatatagcttgatacattttaatcagagaattaagagtgatcttagaactttatctcaaagatctttaatcgaatatgggggaattggaacaatgtctcctctccttccagaggacccaggttcaattcctagcacccagatggtgactcacaagcatctgaaattccagttcaagagatttttttttaaataccttctatgtcctccatggacaccaggcatacatatggcacacagacataaatgcagacaaagccctcatgcacataaaatcaaaattaaaaaatagaatatgtcatttaaagaatgtctatccatctctacatttatctactcgttcaacaattgctgtaagttaaaaatcctattaaaacacacggacatagtgagttagtgatggtgcctacccttggtcctagcacttggaggcaagttaagaagatctctgagggtggggccagtctaatctacaaagagttccagaacatccagggctctgcagagaaaccctgtcttgtaaaatacaaaacacacggacaatgcaggtttccttatttggaagacaaagaaaaacttatattaagtaaggtaggtaagtgaccggaatagttggtaagatgtaaggagaaaataaagcagaggacaggggcgtcaaatgcctgaggaggctggaactcagtttttaatttggcccttgggttgggttagggttaggggtgggttagggttgtattagggttaggattatggttgggttagggttagggctaaacaaatatacttgaacaaagacttgaaagcgttgtacagggccacaaagctggcttagggaaggaagaatgtcccaagtatcggaccataaagaagacagggttctggggacaggaaggaggcagatttagctagagtggtgtcattaatagagaggtgaattcatgaaggcagtcagagaagaaatggggtaaatcctggggctgtgaaatgggaaatctggagaacccagaccggacccgatgctcattttaacagcagtaatgcttagtagagaggaatggtgttgcatggctactgggtctgtgcagtgcagtgtgacatactgggttctgaggctactttagagagtgtcgtatctgatgatgtaatagatgggagagggaggtaaaggagttggcggtggctttgggttggttcacgtggtctctcactttagcagcaggaagatgtgaaggtcatgaactgagatggagcagaaagctgagtgcatttcatgagtagaaattagtttggggagttatttttaataactatatggatatttccaataagcaattatctatgagcctgaagttcagaaggaacacataaacagtatgctgggagtagataaagaaaggattgtgctttgagatagttcactgttgtgttaggatgtccagggctagctgtagtccggtagctgtgctttggaggtgtcatatcaccctggcttttggtgattgtgttcttttgaggtcctttaaccatctggatgggtttggtctctggatattcttgtcatagtagttattgggagggggatgaacctcaatggtcctggtgtggcaggtctctgatggctatccttgggctgtatagtttctgatgtgcaggtctgtatggctcaggagcctccggtccaatggaagtcgccctgggttagcaagctgctcagggcagtttggcctggcccacagtgctcagagaacagggaagatgggagggggaatgcttaactgtatggttcaggagtctcgggtctgataaaggtaggaggagggggtggtagaagaatggaggttctccctgggctagtgggctgttcagtgcagcctggcctggcttggctcagagtgctcagagagtagggaagtgggaagggaaagagaagttcacctgtatggttcaggagtctgacaaaggtggaggagaggtagagggacatttcaatgttaacgccctggaagaccagggtgtagctcagtggtagagcacttgcttagatttgctcttgaaaaaataaataaatgggctctggagatgagaagggacagcaagatgggttgaaagtgaaggccagagctagatgacaaaggtggtttctgggaaagagtagctgggcatctgagtggttcagtgtctaaggcagggatgaagatctcagcattgacttacgacagcaacttggaggtcagattgttgtagagacgtgagcataaattgacagagggtgggagggaaggaattggaggatctaatattgaccatgaatcaatctggagggatttaactatgaaagaggcagaagagaggaaagagtccagaggagattttttttttaatggagacagttagtaatggctcaggaaagggagtattttggtgggggtggaggatctagtggcagggttggccacaggctcaagggcagcttatcattttaaggactggggttaaattccggacatatcgataagtatgcctggggagttggcataaggaaaggtcttctgattgcctcatttttccttgagtaacaggaattgaggttgttggctctgaggttggaggagagattagatagccgttgtctagaagataagatgaacaaacaaacacggtcatctgtaagtccctcggactctcagaggagttatcaagggttcttttgcctcttctatttttgctcctaatagctaatgtccacccaaatgtccaagtactggactcagtgagtgttgactgtcaacactggatcattttacccatgattcatttgcagctaaccctgcatctcactcgctgttcttagccccttatccactaattacacttgctagcatataaccttagagtagcgatgtgatggagtcacagagagcgagaagtcgctattactaccctcaatcgaagagtggaaaaaacaaacaaacaaacaaaaaaccctagatttctagaaggttccatggtttgtttgtggttggtcagccgccctcgaggatcttgcctgcaccaacacagcccgtccaggagagggcagccctgcatgcataagcacgcctgccccgccctcaggctctggaacactgactatgaaggtccttctgttcccattcaagctgcagtccttgatcctttgagagatctgcttcgagcagtgtttcctcccaggtagcatttggcatcatatgaaagtattttgaattatcagaaatggggagtagaggcaaagcaaactcctaaacacccacaaaggcattaaaccatcactacatcctatgcagaaatgtctgctccaaaatgccaatgagtgccttgagaagctaaacaatcctgtcttggtgaacatctataaaccgctcagtaaaactgatagagaggcacaaataatagacagcctcaggagacggaaagatggctcctggagcgcaagcaagtgctgtgcaaacttaacaacctgtgcttggatccccagaacccacataaaagctggacgtggtagtgcacgtgtctgcaatcccagcatgccataggaaaagggaggaggagacgggcgaagctccggaagcttatgttccaactaccctggctattgcagccataaagagactatcgcaaacaaggtggtaagtcgaggaccagtacatgaaggttgacttccgactgccacatgcaagggacggcacatgtgcccacacccacgcacataagcacacccgattgccggcacgcaggggatatgtaggggagatttgatacttcaacccacagaaattagtcaaaaatagcctctgggtttggcttttttaaaagatgtcaagtctttgagggtcaagtgcatcttgatttatcacttcaagtgctccacttgctgaccgttatcaccagtgtgacaaactaggaaatgtgtaacaatggccatgcagggcagccaagaggaaagattgtcccctcttagcatccatactagctttctgtctgtctgagaaaaatgatgccccaccccactctatgtaaatattctgtacctccaaagcataatttgctgttggcactcgtcatcttacagaagaggaactgcaagcttctcaggccctgtgcacttcagatggttcagagtatgggtctcaaagcctgctggctggcctgatgtatctaaggggcatggtcaccacgagggtcatttgcttgttgctgggaacacttttctaaaacatagcagctttagaaaaacataggcagatttctgagctcacctgaaatgcgtctccttcccagccagatgagctggacagtcagtagaccactgttggcttgtctctgtaaagcaagctaccccactacttcccacagtggccatcttgcttgacagaacttagagaggaaggaatggagacaagccagcggaatctgttttgctgaacatttattatcttcagcctttccctcgctgtgtgaactctagggcgagcgtctaaaggcaaatgaacggatgaactgaaagtccacgtgtagatgcgacaagagatacaaaaacatgtttaaatcatgggcaggttgtaggtttcaccaaagaccaaagcacccatttcttccttataataaatagtttacttgaaaagctcatgggagaacatttgaaatcaagcccaggcacagagctgggagctggtttaccagtgtctgcaggattggtagatatttgtaatatctaccgatatctaaggatgctttaggtcagaggagaaaggaaagcacaccaatagtgagcattgttaaaacacccttgctgaccttaatgcagtactgtgctcctggaatacgggatagtgatcatataagaacgacagtgataatgataattgttatcacccagggaaggctacttctgtgggccaggctttatctcagaaactattcagattatatcactttatgctcaaactaccaagaaggagttagtacgcaggcaagactaagattctaagaagctagataatgcgtcctaggcttctacaagaaggttaacattgagatctgaaccaaggaaagtaggcatttcacatgtgccaagagggtttgctcttgaaacaaactataagtggaacctgtttgagtaaaggaagactctagagtctcttttattgagtctacggatttgttttgttttgttttgttttggtgaagagttctataatacagtcttaatattttgtgtgtttttgtcaatgtaacatatttggcctccatcacacaagactatgtaacagaaaatgcacagggcaaggtatttttctattactcatgaaacatcactaatgttggactcttcggcacccattttcatgccttcaaaggagaatgagttttagggtgtatgtcaactgtcttccaaattccctatagtcactgtcaatagcgttggcactatttaaattcttagtgtttggtgtatgaccttaagctctgacagctgcatttttgcatactgccaaagaccaagcgtgaagaaacatggttcactgaaccgtcttccaggatacgggaactatcggtgtaaagcatgtttgtattataaactttaggtactgcccaggtgatggaaggtggccaagtggaatataagcctctttccggcattcggtatatgtggtggtaccatttaattggcctcatctggactagcgaattcatccttgcatgccagcggatgactgtagcaggagcaatggttgcttgttatttcaacaggtgagtccactcttttatccctgaggtttgtctgggtgctttggcttgtatatgcatctctgaagatatttgccagttttttactcaatgccttaaaagagagtaacaataattaggaaaggggaaaaaaaaagcctgcatggtggcacacgcctttaatcccagcactttggaggcagaggcaggtggatttctgagttccaggacagcctggtctacaaagtgagttccaggacagccagggctacacagagaaaccctgcttcaaaaaaaaaaaaaaaagaaaagaaaaaaggactaagttaaaatttggcctatatgctcacttattggtcagcggaaatagtctcccttaaaccccaaaattctctaggctcttttgcttaaactataatgtagtttcgtgtaatgtagaaagaaattagacagcaaagtaattatattctctagaatttaaaaatacctaaaagaaaagcttgtattctcctgtaactatccattcttaaatactatggatctattttatttattttatttttattttttaattttttttggcttttttttgagacagggttctctgtgtagccctgtctattctggaactcactctgtagaccaggctggccttgaactcagaaatctgcctgcctctgcctcccaagtactgggattaaaggcatgcgccaccactgcccggcctatggatctattttaaatacactccagtaactatatcaatggttttatctttgtaaaaatcagaaggatatttacttggaaaaataatgttacaccctaaaggaactgtgaactataattcatgtccttagagttaagtgccagggaattaattacttacttcagtgtctatggcacattgcctcatgaaaataattgaggactattgttcctctactcccgccccacccccactcacctgtacctgggccgtgtgcatctcttgagtataactctcctcggattagagccagaagagcaggcccaagacaatgacagggttgcactggaagaagcagtttgctcctggcaatgctgaccctcctctggtctctcagaccaaatgagtagataaacatgagctttctggagtccaaaagccaagcagccaagattcatgccactaagcagttgcctctggatgataaagagcactgtgtgggcttttaatacagtggtaccctttgggaaccacatcattaggaactctggaggactcacagaggggctgctgcccttggttggcactgagagcctcccagaagcaggagatgggagttgcttcgtttcctataaagaagaaagatcttctccctcaggtaacacatctgtctgagagagagagagagttatcttagcataaccagaccaaagtgtttccagcaaggacttggatgtggaggcccggtggttccgggacattgatctcatccctaccttctctccacactctgtcattaaagaattgtacaggtcacgagaaatggacaagcaatgacaggcaatgagaactatcaggctttggatgctaatttaaaaaataaaataaaattcagctgaatgatgaaaactgaagacatgactaagcacactaggaaaagctagaaggtctgcttgtgagtgttggctgtgtgcagttgtgcaagagtggcaggattcaagcataaagtgtgctttaaatttggccagatggctcagcgggttaaagtgactgccacgaaaagccaagcgacctgagtttgatccccagaacccatgctagaaagagagatctcacttccagacgttgtcctctgacctccaccagggcgccccaggcctcatgtttccacatacacagcatacacacaagcactcaacaataatagatacaaatttagaaagacagattgaaaaatacagataaatacaaagcaaactgtgcttccagagatgttaaatcttcaacccctagatccttcttcttccagaaagagaagaggcctttgctctccagggctataacctagaagagggtcagaactcggagtatctggcaaagctgagttgtgggcaatactatgcactgaagcagggagagccacacctccccacagcccacagctcagttccagggtgatggcagccaagttggtctctaaaggggggaaaggtccaagaagctttctaacccaagtcaggtgccacatgatgaagctcccagagaaacagacctccagattcctatgtcagcagtggtactctggtagacaacaagcaagctctctcccacagagcatctgacttagttagggttttactgctgtgaacagacaccatgaccaagacaactcttataaagtacaacatttaattagggctagcctacaggttcagaggttcagtccattatcaccaaggtgggagcatggcagtatccaggcagatgtgggactggaggagctgagagttctacatcttcatccaaaggtggagaggagaagactgacttccaggcagctaggacgagggtattaaagcccatgcccacagtgacacactttctccaccaagaccacacctcctaatagtgtcactccctgggccaagcatattcaaaccaccacagcatccaagggtgttttgaactgtttacttgtggttactatgcatacaaagaaagtgaaagagattagaaaccaaacaaaaggaatttagggaaaacagacacaatgcaagctgcaaaggaagctagcgatggtgcaggagacacaccaataacatcaccaaagaagactaatggactcatagtctaaagtccctcccacaaaaatgagcattgtgagaatgagaaagatcctttgataatgaacaatctcaaaagtaagaatctgctgttggatgcttcaactaggaagctgaagagctcttcctgaaagttgaacaaaaaaagttgttgtttcgttggttccttgggtggttgggtgggtggaccagtgaatgggttttggtgtttgtttgtttgtttgtttgtttgtttgtttgtttgtttttgaggcagggtctcttctagcccaaccaccaaacannnnnnnnnnnnnnnnnnnnnnnnnnnnnnnnnnnnnnnnnnnnnnnnnnnnnnnnnnnnnnnnnnnnnnnnnnnnnnnnnnnnnnnnnnnnnnnnnnnnnnnnnnnnnnnnnnnnnnnnnnnnnnnnnnnnnnnnnnnnnnnnnnnnnnnnnnnnnnnnnnnnnnnnnnnnnnnnnnnnnnnnnnccagacaacagcagtgaaagtgaaagacaccagcagtgaaagtgaaagacaacagcagtgaaagtgaaagacaacagcagtgaaagaaagactgtccatactcccaggatccctgacctcaagcttcagaatcaaatctggcatcctcccaccatcgatcaagggtcaacagtcacgctcacacaaaatccccagagatttccctagcacatcctttcttggaaggatgtttctactgatagtcctgagtgagctgggcaggggaaggagcttaagaacgtgagcagtgggtagagaagaggcgggagttccggggaaggtggcagcgttgcgatcactgtaacaaaaagtcaaggctaaagcagaggaagggagagacagagatagagacagagacagacaacacacagagtgtgtgtatgcgtgtgagagagaaatagagagagaaacagagacagacacggggtgacagcacacacacacacacacacacacacacacagagagagagagagagagagagagagagagagagaggaaggaacagatgtgcttatgcttaaatacattgaaatttacactcagcccggtgtagaatgaagcccaagggaaagaaatcaaatataaaaaaatgtgttacaggtgtgaactccaggaaaacctccaagttgtacagaaaaggcaacacaattgaacactgctacttgcatcagctgggaacgacccttcctcactgcccattctatttatgtactaatgatgcgagcgtgaaacaataacaaaattagtgtcattgagtagtagtgagaaggtgagggttatgtcggggaagagggtagggaatgagacctgaatcttctgtatgggacatctattatgaaatgttaccggacagggtgtgggggggggatgaaactcgggtcacctggctttccccatgagctgtctctctagccctgtggtgtagatttgtaaccccagcattaggaaggtaccaataggcagatccttggacagtgatagaactcgagtcaaaaagcaaagtttggatggcacctaagaaacaacatcccaccctgctattccaggttgacctctgaactccacatgttcagaggaacaaggggagaaggggggggaggggaggggaggggagaagagagaggagggaagagggaggaggaagagggagatgcacagatgtccacgcctataattatgacagtttgtatttcttgtagcattggagagatgactttaagagccacctcccagcctcctcattctgtcttgcaggttttgctagagaaatacatggaacagacatggtctttgctgtggtgtgctctttgctgtggccacactgttttctccgggctatcatctttgttggaggccagctgcactgtgtagcccagactttgttcagggactagggcacagaattggctttgcatcatgttggagaatctctcaagagtactaggcttgatctaaaactattgctctcagagttctgaagtggctggggtggttgtaaaacactatgtatgcactttgacttaaaggtaccctcaatcttctgcagactcctatcaaagcaatcactaggtacccagcgtacccagtgccttaatgtcagttctcaaactatgcccaggttcagagattagttttttgtttgttttttttttttttttcagcttcaggggaaaataatcaaatcgtcttcctaaaggcagacttttctggctgtgagggagacagagcttttagctctagtaagttatgcagtgaagagaaatagcaggtagtatccctggtgactatagaaaagggtggtgacttcaaagacactcaacttagtctctcctttgcaggactgtctctagattgaaaacaggtattgagtgactcttggcttgggttcaaaggaccttttttttttaaagttccctctctcatcatgtgataacccagcttctaaacctctgtgtcctcctgcagacaagccctgcagagcttagccttgtgacttgggagggaagtcagggaccccagttcccctgtcccaaatgatttatcccactgccgtgaaacccgctcagaaatctgatacctgaacccagacttcagtacctggaggagcagccccgtttacagcagcctgtgaatcatttctttcctaggcagatgggaagcaggtgtcctcttcagcatcttgctctcgtaagcatctaaagcttataaatctcaatggaaaagtaaaccaaaggaaaaagaaagaggagacgggaaaatgtgtcagaatttcctggcctactcttccagcatcaaatcaaaatgacaaaatagattttccaccccgacccccactgctaccgccaccccccaccgccaggatctactgtagtctaggctgccttcaaattcactgtatagaagagaatgatattaaacctttaaagaaagagatttatttattattatatctaagaacactgtagctgtcttaagacagcaccagaagagggtgtcagattttattaaggatggttgtgagccaccatgtggttgctgggatttgaactcaggatctttggaagagcagtcagtgctcttacccgctgagccatctctccagcccccaatattaaacttttgatcctcctgccactacctctacctcctcctgagtgctggaattgtagataacaccaccactgggggggggggggggcgtcatacatagctggagattgaatcccaggctctgtgcatgctaggcaggtactctaccaagtgagccaccttgaaacacacagcagttgagtaggcagccgggttctaccccagtattgctgccatgtcccctttctcttcctggaggacttaagagcaaactgcagcggataccaactctggaaaccttgctgcctgtgggcctcctcctccctcagactcccaggccactgtcaaaaccctcattcctagcaacttagcagacccaggcagtggtagaggaatcttttctaaagaaagcaagcttcacttggagccctgaagttgcttctgggaaacccggcctccttttctagaatgatgtccctgggaactcagggtcgcgagaggaaggtcagcagaaggatgatgtcatctctcctttcttttcgatttcaggtttgagggagagggagggctgctcccattctggtctttcttcccctttcttgctctgagaagctgacttgcactcattcttcagagctctgtcattacaagaccagtaaatgattcacacttaaatgacctttaaggaacggagaagaaatcagctggtttaagggaactcaaagctgtgtagagctaaatggcccaactttgttgtttcttcccttcaaaaaccatagctcttggttacctctgctggcctgggtcctgatcatgtgacttagaggatggctatcatcgccaagttaatactggcagtaattacacatatccctcggttgtttaaacggtgaacacaagacagacttaatctattgcaaagaaaaataatgtcaacagacaaccagaagggcagatggaaggatcaagaactattaaagaaacacacacacccagacacacacacacacacacacagacacacacacacccagacacatacacacacacccagacagacacacacacacacacacatacacacacacacacccagacacacacacacatacacatatatataaattagctcactgatatttttttctgttttgtatttttgttttacacattttggggggcctccccaaaaagtgagttagtccaagatgtaaggtaaccttggctaccaaagaagataaagtacttcctgggccaccactttacaggttgctaacgccaatgaggatctgaaccagagaggaccttctggttacattttacacagtgagttttgaatgttcttttcctctgttcccaggaatcaaaatgaccctcctgcccgtccaatcctttcgtctctcttcgtacttttctgctaccatcaaggaactgcggtgaaagggtcatttttactcactgtgacaaggatcccaagagtcattttcatgtgtatttatagcactctgaaagagccggtaagacagccccctcaagccaacgagctaaggattggaaatttaaggtccccactcaggaactcagacctacttcccaagctctgcttttgtcctggctgaggaaggaggagttgcctgttagctgcagttctaatcaaaacgcagagcaaatgcttgaatccttatagagcaatttcagctaatgtttgtgcctccttcttgtgcttgtttgtaagtaagatacattacgaagtaggaataatagtggctctgttttgatgccaacatactccctgcctgctgtgtttccagaggatgccatgggaagtgattggtgtgagccaggagagaagtgtgtgtgtgtgtgtgtgtgtgtgtatgtgtgtgtgtgttcgagtgtgttctcaccttcacagacacttgtgcgcgtgtgtccacactcacacacacttgagagtgagaaatgaacacgctgacctacatttcagctcaaaggacagaaaactgtagggcttttgtgctcggcgttttctcctcctcgggttctatttccatgcgcatttagttatgaaagccagtggaaaccagaacaccaggaaaacagctgttctcatggcgtctctaagctgccacacaagggaggcttggactttccccaactttcctggactcacacaatgctaatccttctccgcctctgttcccaccttgggggtttgtgacctgctctgaaattcaccaacctacctgattccagccctctgggtatagttacaggaccttaataaatggggaagttttatgctggctcaccttgtttacaattaattgtgcttgtttttaagaacagaaatctaaattgccgatattttaaagtccacaatcaagatttcagcctagcatatcaattaggaataatgagttgaactgcacgctggctcccttatcttactgtgttgagcagctgactatgaaatattttcctgtggttcctattcaggcctggcctggctgcattttgaagacttaaagagacagttttacctgacccagtgcaaatctaagtaagctactagagcctttgcaaacctaaaagagaggtccttccttccttccttccttccttccttccttccttcctttcttccttccttctgtctgtccttcctaaggtttatttattttatttatgtgtatatgtgtgaacctgcttgagcatatgtgccagaataacatcagatcctctggaactaaagttacagatggttctgagccaccatgtgcattctgggagtcaaacctgggtcctctgcaagagcagtgttcttaaccactgagccatctctccagtcccagtgaagggcttcttgtagtacagaatcacattttatttttatcttaaatatactcatgtcaggtaagtattttgtacagatgtagcacacatctaaatatatattttactaatatatatttatgatgtgtatatgtactaatatattgaccactaatacatatatttaataaagcctatattcatttctttaacatgtgaattagtcattggtaatcataaatcaatgaacaactgagagattgctgtcccctactgggcaaggtatcttaagtcctttgggaaaacagcctccataaacccaaaaggaaatctgtgggagacagagatcttgctgacccagatttaaagggctgttcatcacttcccagattccccattgttcaaagcagccaaatacccacgcagtgatgtcactgagataaaatatgacctctcataggtgttttagcatccttctagctctgcactgtgtctatagcatcagcatctctcacagcctcgcccgtgatctctcctgtgttaaatagtctcatacacagttgctgccaaggtaaaatctgtccacctcaagtttcatccagttgaattaacactgggataaaaaatgtctataagactgagtaggataggtcgggcagtggtggcgcacacctttattcccagtacttgggaggcagaggcaggtggatttctgagttcgaggccagcctggtctacagagtgagttccagacagtcagagatacacagagaaaccctgtctcaacccccccactccaaaaaaaagacagagtaggctagttgagaattgttagctgttttgggtgttttgttttgttttaactctggatagtagatgagacatggcaaccaacccttgcttagctagttcattcagtttttatttttacatcttcaaaaattctatctagagacagaggcaggtggatttctgggttcaaggccagcctggtctatagattgagttccagcacagccagggctacacagagaaaccctgtttcaacaacaacaacaacaacaacaacttctatctatctatctacctacctacctctggggaaaggagctgtgggtcctgggaattcagctcaggtgtggtgttgagcgtttttgcctcctaagccagctctccagcctgggattttttctttctttctttttgttttttaacaatagaagtaaatagaacttagtgagccatcccttccccagctaattcattctcaagctacacactcaaattagatttcagaagattgattgactctgaaatttagtctgaaaacttcactataggacttaattttccccaacattaatcgtgattatttgtgtgggcacatgactagtatctataatatatgattctgatttcttgttggtgacaaataatttgcaaacttgaatttaaaaaaatcaaagtgttcaaggcatgggggcacatactcatggtctcacccccagaggctagcaagagacttgagagctcaggactggtcttgccatacaacagcacctttgtctccaaaataaaataaaataatgtagccaggcattgtggtccataactaaaatacctacatttgggaggcagaagcagaagacacaggaggagttcaaggttagccttagctacatagtaaatttaaggccagcttaggctatcagaaactccgtcctcaaaacacacacacacacacacacacacacacacacacacacacacacacactgtgaataccatttgacatttgacacacttagagacagatgaagagaaaagagaagataagaatttcttctgttgttgaataccagttaacccgtttccctttctgtggaagttaactgaacacaccaaaagcctgcataaagcttagctcacctgcagtgatagcaattagtccagttgcttgcatgagattgagacagtggggctggcaagatggctcagtgggtaagagcactgactgctcttccaaaggtcctgagttcaattcccagcaaccacatggtggctcacaaccattcataataagatctgatgtcctcttctgatgcgtctgacgtcagctacggtgtacttatgtataataataaatctttgggccggagcaagcagggactgagtgagagggactgaccggagcaagcagaggtcctaaaaattcaattcccaacaaccacatgaaggctcacaaccatctgtacagctacagtgtactcacatacataaaataaaataaatcttaaaaaaaaaaaaagagtgagagagtgagaagtgctctaggaatcccctactctaccccatcttatccggcaccctgccgcccatactgcacccaccctgcacccagtcacccgtatccccacacacatttacccatacatagacccacaaatggaagcagtcctcctctttcttacctctgcttaccctctctgtcttctctctatgtgcctggacctgactgagctcagcagcgcagtgcttggtcaagaggtgaattcagatgcagccactgtgggctttggtgtctccttaaatatctgtaccatctcaaccaggtatgtgccttccctttgtctggggggggggggtatggagtatggggagggggtagtggaggtccgagggtggcttctattgcttagatcagctcattttccagggtgggttgtgtaattatttcagcctttcagtcatgcaacgtgtcaagtccacttagtgctgctaccgtttagtcacagacaaaatgggaagaaatgcacagggctgtgtttcaataaaactttattgatagactctgaaatccgaacatcgtgtgatttctcataccgaaaaatatttatttttcttttgccttttccgctcattttaatgctgtagatgccattcttaactccagtctgaggagggcagggcaagagtctgtcagactgatcacaccccctccctaactaaggctgtggttcacagagtcccttaccttcaaagtgtaggctattacaacagcttgtcaaattctgatcaaattactttcttttttttttatatacaataaaaagggtgcacaagccttttgacatttgagcctaatgaatatctgtcacgtgagagcaaatgttggtgtctcgggagccccgattcttctgaacggggatagctgcttcccagttttttgccgttcacccgcccttccctttcaagctacaaatactctcttaaaagatctttcatattgatggaggcttaaatagatgttttatttttctgtagttcatttaggaacgtttaataacccttagtcacatttacacaaagcagtgccttttgtaaggcagggggctgttttataatttaagtgtgcacagaaatctcacttagaagagtcgtccttattgtggcccatcttgctaaacagatgctccaccagaagtgaaggggctaattaggccatctatgtttgatgctttataagtggtatttagaataccttttattatacagggaaagtgtagcattctttttttttttaagtcctgtcctatttttaaatctgagtctgggtgtacattttagaatgcatttggatctaaataccagaagccactatatataaaacacaataagataatatggcgtttttcagagaggtggggcagatagcaagtgaagccattcctagtggatacactcaaggactgaaatgccaggcctctctcctcaaagctgtgtgcacgagtctggacaccagctgatggcaaagaggttttgagatgcggtgcattaaaataagataagatatctttgggccagatccgcagtgggaatgattgcgcagggtaacaagagtaagctggccgtgctccggctctgcgttcgttcgtgagacaagcaggagtggctctcttgatattctgatcttggggtctgtgctgtaagccatggcctccactgactatcgtggcctcattgcgtcagaagtgctgggggcaggaggctgggaaagaagagctggagggggaggaatggatggaacagagagaaaagatggatgccagtgttgacaggagagaagggtttggaaggacctggtctaaatgactttctgaaagtgaagtaaaggcttaagaaggaagacagatagtaaagattagccctcatgggagagaggacacaagagaactgcagagggaaaaaccagaacagcgacatgaagaatgagtaatacagacactgccataattaacgggaaagggcagtctttcttataaggaagaaaaaggaagctctctcactagatagatagatagatagatagatagatagatagatagatagatagatagagatagagatagagtcatatatagatatatagactcccaccataaataacaaaataatccaaactggagcacagacccaaatcctgtcagtaaccataggtttgggcaaaggagttcttcaatatgacatggagatcttaatctaccaagaagaagaatgggcacagatgaggctgctaagctggtagagggctaacctagcacgcaagtcccgttcccagcaccacgtacaccaggcgaagtgtgtgccagtaatcccagcactgtggagatggaggtgggaggatcggggaattcaaggctagattcagctacttagaaagttcaaggccagtctgagttacacaagagcgagaagagggggcaaggggagtggggagtcggggagataatgatgattaaagtggtcgtcagcacggctgtcagcttcatctggccataacaaaggaaaatgagttcaaagtgaggaaatgaatttagattagactgcgaaatcgtctaatcccactgggctaggttattgcgggggtgggagaagcgtgggcatctctatgcctggaaatcagatacagaaacagccaaagcctgttttcttcactcggcttgaggggaaggaggctggggaggctgggagaggatcagatgcatctgtcccactcagcacccagattctcgccctgcagctccgaggtccattgctccactccactgaggttcatcactgctccctaaaagcctcatccatcttcattaagacccgggatggacaggggcagggagcagtttctgccttttgtagacagccagcctaagactgcacggtgcttcattcgtagagtgggggaatagatcgccagacctcatcatgtgtcacttacttctctctgcatcctaaataccaaatgtgtgtaaggcaactgtgtcgcctcgcacattccttgtgcaagtcgtttattcattgatgctgtgtgcaaccatttgagcctgggtaccgtaggcgaaggggaccctagggatctgagctgtgtgtgtagcagaaagaaacacatacatgagacatgcgtataacagtgagacattttttaaaaatgcagacgctcagaaaaggacgacttggtaattcaaccctctgtggctatcagcagctaataaaacagcggtaatgttggctgtaggctattgacaccgactgccaattgatccttaatggtgtagtagtatctccaacttacaggccaggagactgaggcttgaataagaccccatagtcaatgtcagaagtaggagtcatttggcctccacaaccaagatttatcaatgtgaggcttttgtagccatggtctcagaaccactgtttgagctattccccggccgctttccaatccagacaggctagcttattagggcatgggggtggggttgctaatggcagacttggagaggcaaaaggtatatagggccaccaagaagctgcaactatgtatccagcagtttcaggctagggaagcctttgctgggtggcccactccctctcctgtcctcctcaggcaagtcagtgtggtccaggcttctggttacagaggctagctcatctcagtctggatggcaacaaagcccagagactccctgctccttaccaacacccttcccccagatgaaatctaccccagggatccaggctgctaaccactgaacctgaaaacctgccttctgtgtttcttttgttgttgttgttgttttgtttttcaagacagggtttctctgtatagccctggctgtcctggaactcactctgtagaccaggctggccttgaactcagaaatccgcctgcctctgcctcccgagtgctgggattaaaggcatgcaccaccacgccccgctccttctgtgtttcttactgtccatacccaagtcgtcataagaatttccactctcccacatgcggagcatctgccccagctctgatagtggctttgtttagctcagtgccccctttaagtataaatatcctggtgggggcccacaacactaccacagatgtttctacattgatttgaaagcatgctagaatttttttttcagactttagagaaaaattacaaaatttcattagatttttattcttgtgtacaagaaaggcctttttaacccatcagtaaaaaagatcccatgattattaaaatgtgtggggtttttatgttgtgttgtgttttgttttgtttatgaaccacaagcagtgtgttactttatttccttagactttgtattctttagtctgttgtgacctctaactatctgggtggtgcctggcaactctctaagtctgggaccttaggttggcagagagttgggatggtacaaattgtgagagacatcaccggtatcgttccgttcctgtggatcatgtaaaccggcagacttcgttgagtgtttggctctaacttatttcttatttttacttcttgttgttttaagcagttttcctcttctatttttcttccttccagcagaggtgggagtgggtgtaggaagtgagctcccgggtgatgccaaaactatttgaaaactaccagtctcctgggggaatctcccagcaaatgacagctccttagttgggtcttgcagctgtctgtctctgccccttcctgctttgtgtaacctgagctggccactcaacctcagcagactgtgtgggttgaaagcgttgggttaagtaagtatcacatccatagagagcctgctggccggtgttggggtacctatctcagtgcagaggcatgcagatcccacccgactctgtcatgtgcctgtgaacccaaattaggaactgactgtttccctgtgttctaactcgacacggtctcccaccaccaccaccaccaccacctccccaaatgcttcataatccatggcaaggctgactctggaatcatgaagatctttgtgctagccatttgggatcttggggtggaaatggctctccagcatatctgagaaccaaacagagccatctctctgcatccacttcgagggtttctgccaggagtgctactgggccatgaaagacagcatatatgactgacaatggaactcaggacagaaaatggccatagtaggtagccttggaaatggacacgtacttttagaccctgtgctgtacctgtctcatttctctataggtgatcacacaggaagacaggtgtgtctccctgaggaggggacaggtgcactgaggcagactgtctgtcaggcatgcgcctcctttcctttgccatctgtctggatgcacgctaagccagtgcagggattgttgcttcccggcatttgcataaaagaaaggggaactccgccttttctgagcaacacacaggtttgtcagaaaggttcagacagtaccattcatttgagtgcagagtagagcctgctgctcctgggataggctcatctcccctccctcctcctataccactctcccccctcccgcccccgccccgcccccaccccaaccacctgcctgccaatcatttttatcagtgaatgtaaatgtaaagtctgcctgtcttccaagcttttgtagtcaacctgactttgtaaaatcttaaagcctcgtccccggcacacagtgagcgccgcctttctctccacccatgaagaacagcagtacttctgcatgtcaggttttggctcatcacaagatctccactgacacttctcccccttttccagagcagcacgtgcgtctcagggaaaggatgcaatgaacgatgggaacatctctagctaggttctgtgaatggcggaaaaaggcctaagagaaagttctcttagtcaacagtgtggccctaacagtaactgtctgtggtcatagagcatccaggtagcgtttctgtctaaggcgtaggtggctcaggcctcctgcttctcctgccggctggctcagagctatccctgagcagccagctgttgtgagcgctctagggaggtgcctcctgtgtgctcgttctggagaggaatgcacatgtgtgatcgtattgacagtttgcatgaaggctcgtatatagccagtgataatcccccgcttgcagctgtctcgtggcagatgctgttacccctgctttagatagaaaggaattaagactcctcattgtcagaggccccagattgtctggaaggaaaggagctgaatccttgtgcttcccctgtgggcgtgcagctcaggagctgctgctgggtaaggggggcctttgtgtgcctgtcccaggcgtagctcgaaccgcacctgccgtgagcacgctgcaactgtcagggcacgagagggtgaggccctagggttctgagtgggcctcagtccaccctcagtccttcgggaaagactcagggagcagctgccattaaacaacaaaaccaggagaacctgggtgacattggctctaggatttaaacgtgggcttttgccagtcctggggaactccttgagggccttcctgatttgagattctacattgagggggaaaaaatgagatttattaaatgaaggcttgcatcactatcagggagagaaggggagtgatacaggggtacccggccaagcaggcacctctgctgggaagtgactgtattctgcataaatgactctgatttcctcccaagtgtgctacccccagagacaaggatgcctgctgtgtactgtgtacttacagatgctctgctgagcactcttacttcgcctgtattgactacagcgggcctcacccatcagcccttgaggggtgccctgttattattctcttccaaccagatgatagcatttaaactctaaggccttagacaaaaggaaagtgagagttgcctcttgagctttggaagataccatgggctttccttctttcttgccgaagttcaaaactgttgagagacacaagagtggagcctgaagataccgcctcaaacaccaggtcacctggtttatgggaaaatgtatcccataaactgcttgtcaatggttcacccgacatcagagggaccgagccactctcacaggtcttacccagagagtagaagctggagatgagagtgcagtttctgtaacagcaggacactcccctccaagagagtcaggagagggctgagcaagcctggctggcctatgctcccgtcccccacacaccgactcttgaagcctgccccttccctgaggagaaatgaccgtattctccgcaaggagagtcttgaccattaaaccacaaaaccaggagaatctgagtgacattggctccaggattcaaacgtgggcttttaccagtcctggggaactccctccacaggctaggtcccccagcccttcagacatcaggagacgccttcccttctttatagcaaagtctgtaggtcgaggagttggtgcctcatccacaggtagaggtgagcagagtactttcattccttatctctatcctgtgacttcccccgccttccttactgcgctaagaggcagagggtgggtgagggtgtcccattatccactgtgagatgtgcagaactatatgcagattgacccttcacagggacaccatggaagatacccatgcccctagggcagaaccatcaggaatgtttggaatcttggagggccaggatctccccataaggataggatgagactctcagctccctgctccgagtcccctccatccctctgaagacagttgccccgtctaccagcattctctcttcctcctcttgggacctgaatccacattttcatttccccagcaatggaccagagtaaggatgcagtttgaggacctggatctgagtcaggtactgtgggactcttcatccccttagcttctgctttctcaaacacacaacaaaagtctcgatggctacctcatagacaggaaggatgattaagtaagcgaatacaccaacatttaagtgtgccatctgcctctccctacatgttccataaatgctctttgctataacaaagagaaggtacctcctgatggctaaggggctaggactctgaggacatagcggtggaaggaatgccaatgccttcagaggacgagtggaaatacaggtttgaatcctggagtagggggtcacccagatttgcctggttttgttgttcaacgggggagagggagggtttagttagttttgcttaccaagtcaccaaatacaggaagtctgtgtgtcagagagatggttaaagtgcctgtttcccagggttaggacagatgacaaaagcactcttgtaatcaatcctcttagctctgtggctggcatagagataaaacagaagccattaaagttaccatcaccaattcacggctgagtgtgtgagctcccggttgagctctgaggtaattggaactcctgagttcttgaggttattcatctaatcctctcagttgagggacatcagtgcccatggagggggcagggggtgttcacctaagctgttcttctcatccccagtcccaggcactaccactgcagtcatcactcattgggagagcagagttgttcagggtagcgctttcgcttctcacaacccaaagcaggctgatatttcccccaactccaggtccagcacttacatccaaacctgagaccaggacaggagtatgactgtgcctgccgatagagaaaatgagcctagccagcccatcagttccaggagaagggcttgtctgaccctgtctctactctatcaggtcttcatgtcttccattttccaggaacactggtgacatggcctagcaggggtaactaagactgcttctagatacacaagtcaccctatcaaagtgactgtcatttcttaagtatgaggtgcacttcatgactctaagtgttgtgtaaaacacaaagccactcgaaaaaccaaacacacacacacccacacacacacatgaagccaccaacttatgctcttaccttcctatcaaagcatgtcttagatatgctgggaatagcagatgggaacccttgggttttaaacattgatctatgaaaattaccatggaagtcagcaaaacccaactccctcatgaataaggacatgctgtgaccgtgctggatgcggaggatctagcagccatatcccaatctcctatatgcttccatgcagcagctttgtgcctgtgggaggtgccctcattctctgcatcagaagacagagcatcctcggtgctcatagggagggataacaaagggcgctcagaatgcaagaggaatgtcctacactccaacaatactaaagaaatgtaaagccgggcaatggtggtgcacgcctttaatcccagcacttgggaggcagaggcaggcagatttctgagtttgaggccagcctggtctacagagtgagttccaggacagctagggctatatagagaaatcctgtcttgaaaaaaaaaaagaaaaaaaagaaaagaaaagaaaagaaatgtaaaggttagagattattgctgacatctcccagatccgtttcacttgagaaatggaattaaacagctaagtagctcctaccacaaatgatttctttatactatctccacattgggtctccttgagactcctccaaagtcctttccacccctccctttcctgtctttgaggaacccactgtgggtgcatgcctcgactctccttcctcagttacctctgccctagacatggagaaggaagtggtttgtcctgggctagagaacacacgtctaagaagaacagatgagagagaaggtgagttgtagtgactaaggaataaaagccgtgatctggctgtcaggaatcctgcgatcccacgaggcccccaccacctgagcctcatcttcgagcggttttcacaggagtgaatcaaagaccaaaactcagcgctgtgaggaacactgcaccatgcctgacttgagttccagttttgctggatttctaggaaggtgaatcactattttgggggcttttatgcaaggtttcaggtgttcccaggcatcagttagcacaggttgcccttgaaaaaaaaatctgtttgtcttcatgcatccttgggccctctctaggaaatggaattcttttactttgccatgacatatgtatggccttatatgcccagatttgtgaacagtaggttaccagctcttctaaaagaacacatctctgcaactccctccttcctagacaaatgaaagccctagagatggtgatagacgcctacctttgcttgttttgttaagacaaaagaaacctaaatcactggtcagatcccaccaacctctggtcccttgtcccacagcccagtggggtttccttctgcaggtggagaaagacctcaccacacatcttctgctccaaggcattcaggtcatattgggaagcttttcccttctctttccatattgcagggttaaaagctgggagaaggggggaagctagtaagagcggtagatggactctctctttgccctcatatatatataatacatacagccaatttaaccttatccccattagcttacaaagaaatcagactcagaccaaggttattttatttggccttgacaattactgagaggtaacccctaatctactcttctaactgctggtctggccacctccccaggggtataccccagataattgctgtttctcccggccatgtgctcatggcccatctaccctcatggcagcttcctcctcccctcagcagctgtggtctccaggaagtctccacaggtttttggcaggaaggagaaggagaaagaaggagagtgagaggtgagaggaggaagcaaccatgaggggaagtagccaggccagcagttaaaagagtagattagggtttacccccagtaattgtcaaagccaaataaaataatcatagtcgagtctcatgtctttgcaagtgagttgaggataatcttaagttggttgtacgacaccctcactccacacttagcacctcagtgggacgggtagagtctgagtcctgtagggagaggtgacagagactgggtaactaacacgaatgcgcctggcagagacagcaggcagcccttccactcagagactcatctctctagagcaaggattctcaactttcccaatgctgtagcccttgaatacagttcatgttgcagggaccccccaaccacaaaattattttcaccaccacttcataactataatgttgctactgttgtgaatagtaatgtgaatatctgagtttttctgatggtcttaggtgatctcctgggaaagggtcgttcaacttcccatttgagggttgagacccacaggttgagaacctctgctctagccatggggaaacagattctctgaaaagtaggcaagggagtggtatggataaatttagtgtcattagctgtcttaagtaggtggggctaggaagtctctcaaggctttggcagttggatccagcctttgacagccgttgtggttttatctacccacttcttttgccttttacagaatgcttcagttggcataggggtggggtaaagagagtctcagtgagattgctgaggaatgagacagctgcaccacatgacttcattggggtgcatcccagtgtgaacgtagagaaggttaatcttaggatgtttgccacaccacacttctcaccataaaaggaacagcaaagaaagatccggggaggctcaaggaacaagaggcagctagtctcattgagagccctattctagcctgtatctgggagcttgacccaagcagaccttccagacatgtctgtggtctgaaggatgatcatgaggctcatatggtctcaacaccggccctgggtccatgctgcctttgtacaacaattttatttgcaaagagtggctgggaatttgtaaagcaaggaaaaataaaattaaaaaatgcactacctcaaaagagctgcccttatctaggaccgagtgtcaggagaacagcttactgagtagatctaccaggggagaaggtaccttgaaatgagaagaccagcagccaggtgttgggggttcagaaaaaaaaaaacacacacacaaacaaagatgtcatacaagtaggcatcataattgagatgctatagtactagcctaaacgaaggtacatattagctagatatgtagtcttttgcaacagaatagagaagctagaaataaattgtctcatatatggctagcaacatcagattacatcatagagagaggacgggcttctcaacaaacactcttgaggaatctgggatctgcatgcagaagagtctcacgggggtagcagtcaaacaccaactcataatgaacaatgaactgaaaccagtttggttctgaggacctttatggcagctcataactgcctgtcactccagagctctatcctcctcggtcctcttccggcagtgcacgtgtgtagagcacttagcaggccaagcacccatacacattaaagtagattaaattttaaaaaaatgatttaaaaaaaaaaaacctggaagaaaacacaggaagggtgtggaaggcattgtatttagcctgaatggctcatacgtgacacaaaaacacagacaaaaaaaaaaaaaaaagaaaggaaaggaaggattcaccttcaactcaagaactgcaaatcctaagaaacagtgcttgcagtgatccacagagccaaagacccannnnnnnnnnnnnnnnnnnnnnnnnnnnnnnnnnnnnnnnnnnnnnnnnnnnnnnnnnnnnnnnnnnnnnnnnnnnnnnnnnnnnnnnnnnnnnnnnnnnnnnnnnnnacacaccacataacttagttttttcaaatgggcaaaggatttgaaaagacatatgtccaaaaatctacacaagaaccccaaactacataatcacaatatagatgcaggggacctgggtcggacccatgcagactacctgattgtcactcccctcagagccctggttagctgattctgtaaatccatctttcttttttgttcgtttgtttgagatctgtttacttttattctatgtgtgtgttctgccagcatgcatgtctacaccgtgcatgtatctggtgttccggaagccaggagagggcatccgatctcctggaactaaatacagatgattgtaagtgagcatttgattctgggaaccagatctggagtctctgcaagagcatccagtgctcttaactgctgagccatctctccagccccaatccagccattataaaaaaatttcccacaacgttagtcaagccacagtacagagcagaacctgggttctatctgttggccctcatcctgcaagctagcagtcagctgtagccttgcctgatgcttgtcagtcctcggtgtgttcctggatgggtagacacctgtcttagaaccatctccccttaaatgtacggcactgggaacacgtccccgttcccacatctgtcctcatctcactcaggccatctcctcagttctcaggtacagattggagatgctttgtgttgtactgtggaaaattttaatcccaacccagggttcctacctagcctttgaccatttagttcccggataaaagacacacacaacctttatatttacaataagccttaaacaatacaagagctgggcagatgtctcccctctaggctattagaatctactttcatacagatagccctgagttattgcttactatgtttaatttgggcttctctgaactctagttggccagccctcagagccatgttttcttgacttctctaacacatatcagcttctcctcctcctcctcctcctctttctctcactcatggttctctcttgactccctccaccccccgccaggcccaggaaccctaaaatccacctatatcttctattggctgtgggcatctttatttaccaatcagaaataacttgaaggcaaggtcacatagtgtcgattggggtccacactcagactctctggggcaaccaggtcttggggggcctgcacttagcattacaatacacagcatgagaccaaacctcaccagtgttaagtaaaggaccaaccatctaacgtctgtgaataccatggtgtctgtggaagtggcatagtaaaacaagccccagggtaaacatcttttgtgtgtggtgtgtgtgtgtgtgtgtgtgtgtgtgtgtgcgcgcgcgccgtgtgtgtgtaaagtttcatacacgagtactatatttacatcagggctaaacattttgcacacaccgtctaaatgtaccatcttggggactctgagtattaggcagctgccagtcactataccagtgaggaaactgaggcctggaggctgaggggcatcaccaggatgagagcgacagcaggactgtgtggccatctgtatgatatcccaagcctgagttccttgtcagtgatgaggagtggggggagccaggggccagcccatcccgtcagcgtcagcgcttctaataaaccggagacctgcagccatgccggccttcccgcccccctgcacttcccatttcatattcccacagtttccttacaaaagaccaggcctcctctctgacccgctcatttcctgcactgactaggcacaggtcaaatgagatggatggctgccatcattccggacccagggaggacatcgggtgacagtaacagcctccgcagtcctgattcctggacctgcccagtcactcagagtcacatagctgcatctcggggtacaaagctttcctggatcagccaagggtcaggtacagcaagatgagcttgtctggttttggcttgtcctggatctgagggaagtggaatactctctcacagtatgcactgtgtgctccatgattacgctccgcattggccacaacctactgacagtggggtttttttttcctcagtagaatttgacacacacacacctcgggagggggacatcagaagatgtctttaaattgattatctattatttagagaggcacacagatgccacagcacaagtctagcggccaaggtgggagttggttctcccctttcatgtgtgtgccccaggaatgaagcgcaggttgccaagcctgatgggaagtgctttacctactgagccatcctgccagcccttggccttttaagcctaatgtctaccaaagaaaaacatatcagacagtcaatttcaagtttagcatgaaggaatattatttggaaggtaatctttgcctaagccatctctagttctctattcaacgaatatccccgcagacggaatagggctcaggaagggcatcttgacagagggactgcagggtttctcagagcagtgcaacaggcaggggagagagccgcagcaccgggattggagatggcagacctggggccatgctggttgaggttagaagtggcttggaggctctcatctaagaagtcctaggtgtttgtgaccctggcagagataggacaagagtggaaaccatgaagtcaagaagccagagagaaagagaactatcacaatcaacactccctaaagctaaaacacaatgctaaggaaaagaagtcttttagccctcataacagtttgtatgggactggacagatggctcagtggttaggaacactggctgctcttccagaggacccaggttggggcaccagcacacacacagtggttcacaatggtctgtagctccagttccagaaaaactgatgcctctcccaaactcctaaaattaataaacctaaaagaaatattatttaaacgcagcaatagttttcatgttggtttaagtcatgtgtgttgaaggtgtgagtgcacatgtgtgcatagcatgagaggccagaggacaaccttctgtgttcaggcactgcccacctttgtttgagacagggtctcgaagtggcgtgggacccaccaggtaggctaggctggctggacagtgagccaccaggaccaacctggctccgccttccaaaggctgtgactacaaaactcatgtgccaccacaaggttagtctgtgtgtttgtttgtttgttttgagacaaggtctcactatgtagccctggctggccctgaactcactctgtagaccaagcagccttgaactcacagagatctgcccacctctgcctctagatgctggggttaaaggcaagagttggcttgttttgtttagatttttaacttgagttctatggatctgacttagttcttcaggcctctaggacaagtacttgatccactgagcacggaaactttctagtcccagttttccatgattcattttaaaaaggggcttaggaccagggagatagcttactgggtaacactgcttgctacacacaagcctggtcctgaattccattcctggaccccacagtgggaagagaggactgacaaccaagtgatgctgtccttggacctcacacatgtgccataagatttgtgtattcacatgcacatgcgcacacacaacctagtaataagtaaaacaaaattaaagtaagttaaaaatgaatagaaaaggggttttagaaagctaatcctcacatgtgaaagtatttgtgagaaattcaaatattccttcagtgggagttgaacatcactttctttacttgacaacgtttgtactttcactgaaaaaccctgtagaaatcagttctattggctttgggctcctctgtgtgcctgcctgtcctttcatccgtgcatatttgctaaggaatgtggggaggcaaaggaggcagtggccttcaccggggctacttgagactgatcagttgtttcctttcttctctgtctctctgatgcttaaattcacccccccacccccacccccggccacagtgatgaacttggaaagaatgaggccattctaaaaattaagcctaaaagcaaataaaatttcagaaaagcaaacaagactgcattgccctgcttctactttcttggcaggagtaactctcggcctcccctcccctctcctctcctccatgtctcatccctccctcctggcaggacccctgaagaggacagaggcggccgctggcaggcttcccctctcacagtctctctggtggtggtttgcagcctggtaaacagtgaattcttgaagggactggtgaatgccagaccctggaaggctcgggcgtgtctgccgggtgccttgacttcctctccatgtgtttgtgataaaatcagagatgaaactggcttggactagttcctgcaagtttttctaggggcctcggaaggggtctggatgtgcgtggactcagctacccctgtgtgtctctgaggtctgagggtgtattagttactcaagtttgtttcaggagttctttattttgagtgaataaaatcagaactcagagaagccattccagaaataaagccggctattcatggcagggctttggggtgaatcccttcccttctctctggaggaaaactctatttacttttttgacgagtcaacagcagctccagttcacagctctgccatcaaaagatgctgcctgccggttcagttttcggggaggacagatgggtgctctcaggggatagaggataagggtcaggctgggcaagattaagttttaatttaaagatggggggtggagggaggactttctaagtgttaatatttttggagaactctctcaaaataaagagttaatctagctttttttggttacctaataacacaatgattaaaattctattaaatgggaatcatagtgcctacagtgattattttactgagctaaggccaagttatgtgatcagaagagggtgcctggtccactgtgaatcattttgtaaacacatgtgtgcatgcatgcatgcaggtgtgtgtgtgtgtgtatgagtacacacgcacacgaacacacacactcatagaggcctgagaaggacaccaggtttcctgatatatcgctctctaccaccaccaccaccccactccccaccccaaccccccgcaggacaatgccacttactgaatctggacctgtctggtagccagcaagatccagtgagcctcctgttctctgccactttctgccaccctgggatggcaaaactgtgtaaccaccctcagcttttcttatttaaatgtttgcctgcatatatgtatatgtaccacgtgcatgtctgaggcctgcagaggccagaagagagcatcagatccctgctactggagttacagagggttgtgggatggcatgtccttgccaggaaccaaactcaggtcctctgtaaggacagtaaatgctctttattattgttgttgttgttgtttaaacttttcttatagtccagttgttatccccctcctggtctgcccattcacacccctcccccacatctcccagaggatgtccccacctcacccccaccccaccagacctcctacggttaggtgtgtcttctctcaatgaggccagtaaatgctcttaaacactgagccctctctccagccccttcactccgctggttttgtgagtttggagaatttgaacccaggtcctcacactgccgtagcaagcactcttagctgctgagccatatctccaaacaaatgtgatagactttaatttgaaactttaaagccatcagatgtccttttacaaagcccaaagcagggtgcatgagaagagcaagacctggcaggggttactctgaaggctttaggaggtaagcagaaaacccaggcttcttctacaaaactgtcctgccaggtcacaaagaaagatcgcatgaaataccacactgctgtttgaaggaaatgcccaaaacatacataaatgtaaatattttcctgcagctggacctgggtgagttagaggcccaggagtaatgtaacctcagtttcatgtgagtgactcggcatggcctctagtgcttttgtgcttgggtgctctgagctaccctacaggttgggggctaagaggggccaatgaatccgcacgttcaggaagtgtctagaatgtggaacgcagtgtgtactgagtgaatgtttgtgtcactatttacttcctcatagaaggtgcacacctgcctacggaagaaaacattaaaggccacagataggaaataggaagcgcccttccggtttgtgtcaagctgttttgggacataccataggacatctgctggggggtggcgtggggttcaggagacagaacatctgggaagaatttcagttcctgaccctggcagttgtgttcagaggaaagttttcttgactttgggccagactctggtttgccactgccattcgccagtgcactcggtggctgtgtggtcacaccacattgaccctaagtgcagcagggccctgtgggcattatcgcttgtgtgggaatgtcttgcagagttctgatatgatggttttcagccataattcttggcttattcctcctagttctcaacctttctaagactgcaatcttttaatacagttccttctaacgtggtaccgacccccaaccataaaattatctttgttgctacttcataagtgtcattttgctactgttatgaattctaatgtaaatctctgatatgcagcccctgtgaaagggtcatctgacaggtcctcactgcaatgggttgagaacagattgagaaccactgcctttgagatatatatatgtttttctgtgtagccctggctgtcctggaactcactctgtagaccaggctggcctcgaactcagaaatccacctgcctctgcctcccaagtgctaggattaaaggcatgcgccaccactgcccggcacctttgttatattttaagtgattgagaaaacttggaataaaactgggtgctttaggccagggaaaacaaatgcccgctgtgatcttctcctgcccgcatttcacacacttctccttttcctttctaatgcacagcatagaaagtcaaatcttaaacccagcgacctgggctagctcagttggtagagtgcttacccatctagacagtgctagtaatcccagcattagggaggttcagataggagatcagaagttcaaagccattgtagctgtagataaatctgagaattggtacatgagaccctatctcaggttcaccctgtgagttttacatggtcatcaacttagagcggtttaaccattgctctcttttccttgctgaaaggttagccatgggggaagggggttcctcccctatgtggggagggggagttcctcctctaatcgtttccataagcaacccattgtgcttgcttcctatccttcatcacaagacactctttccacacaccgtcaacctctgtagcagctccctttgcacatggtcccggagctgtcagctcagatacgtgcacacactgtggacagtctagtgcactccatcctccagatggctgccaaggaaacaacttctactcagcttaagcgtggaccactaatactgaaacagcaggatgcctctcgggcagtgctgcgcccaccgctcattcagctagtcactaatctaggtctggatgtggcagagagggtgggatctcacggtaaaatgttattaccgtagtcactttaggaaggcatatataatttccctgtcagtgtggttttagtgttctctttcagtgggccgtgagatgttaaagaaaagataaatggttaggagcctcctggaaagtcgtggaatcgacacatgcacaaaaacgtaccgtttaacttttaatcatcttagccgaagaacaaaatctatttttgttgctcatgagtgatgaactgtgaggcagtaggtttcagggagaaaaccctccctcaaaaaaaaaaaaaaaaaaggcataaacaaaacaaaaatcaacctacccttccccacgtgactcgggatgtccactaggaatcagtagggaaagtgttgagcctgtggtgtgggcttgggttagaacttgactaaagagaggaagcaaagatggccaccacactgggcaccgggacatggtccaagacacatagctgaccacttctgagttcccatgaggataaagaacacaggtctttcccatgccccccagaatcttaaggagttgatcagggctctgggtggttggttaatgatgccatctttgaagtgctctagctacgtgagagtgatcagccttcaggtactatggccagatgctggggttctcaggcctgtatctttaaacctcccatccccatcggtaggctctctgtccctgtttggataaggaaaaggagctgagaggctggtcgctgccccgtgcccagtgtctcctcactggaagagccaggatttgagcccaaagacagctggcctacagggcctgtgcttcctggaaccactgtgcttttagattgagttttggcccaatgcaaactgatgaaatgtgaaatccagacagttggtgtttaaagaaaagagtctttgtcttactgactcatcagggggctttgggaaagtgcccttaatcttgctttccagtctttgaaagaatgagtctgcgctggggttagaattcagtccgcagaatgctgggcttgcatatgagaaggcctgaattcagttcccaacaccacataaacccccgtgtggctccccaggcccaaaaactcagcctttgagagggagatgcaaaattgaggccagttcgcattatgtgagcccttgtctcaaacaaactaaaacaaacaaaaaaccaaatctgccattctaaacacacacacacacacacacacacacacacacacacacacacacgcgcgcgcgcatgcacgctttgactcagaaatctcactttttggaaatctaatcttcaaggatctaggatcacaaaattaagacattcagtatgtattaatatcagaatattttaaatagccagtaggtgcatttcacttcttgagttcttggctaaattcaaagtgtaccttcctgcacatatgcaaagcacatgccccataaaactgagttactagaaattaaaatgttagaagccatgtaacaacaccaaatgctttcttaggggcaaaagccaaatatgtaatttaaactgtgtgagttgttttttttttttttttttttttcattcctattccgtttttttctgtctcttccttttccacaccatcctgctgttccctctagcccctgccccatttccttagagcactttcagcatacctcttccccagggtcctcagggcagagttgggtttgttatatatctccctggctctgccctgctctggggagcccacttctgccagtacagttgttgtgaggatccaccagccctggtggaatgatttttatcttgtttttgcccggaccccagatatttcaactatcttgggcacacgttaggttattttttaagtgctttcccaagtgtctggttgatttcaaattatgaatcctattttgtacagggaatgcagctctctagaaacaaccaatactatctctcaggcccaggggatcctgaagaagccctcactaactccataccagctacagccttgggtttggctcacaagtccctagggtctgctctctttttgttacccaaacacctttccctgccctccgactctattgtgtattacaaaataacttatatcgactcattttttccatgtgtgtgctgggccattcagcctgcaggattgacatgaggtcctttcccattttccgaatggtatggaaatatatttgactatgataagaaatagatcatagtccagcttgtttgttttgggtggagatactaggtcacatactttgtactgtcattctgttgccttaaaatgccacaaatcaccgtattcataactgatgccttctgttctaggatgcgtacactgcaactgccattaacgggacagacttttgtacatccgcaaaagatgcgcacacaatcatagccaagaattcaagtcatctcacgtctgttaactgctttggaaactttgtcattttcctgggaaaggtgagatgtcttgactaaataagtactaggtacctggaagtcaacaaagtagccaacaaggaggctgacttgaaagggaatcatgtttgttgctctggagtagctgccatgtctcacccctcactcagtcccacaatcctgtgaggcttcctgttttacaggtgactctaaggtttcatgtttccagggtcccacagcccctatagttgctactttaattcttgactctgatctttcccaccacgtcttctgtattcgcagcgaaacactctcagttctttcaaccattcctccttctctgacataaatgccagttttcaagcaatgcccacaagtgaacaagatcttagtcaccagctgtgacctgggcaataccatatatggtgactgtgccccattgaggattctgtgcttctgcatgcagagtctggtgcagggctgtcatagttggtgccaagcaagttaaggcaggcttggatctcacaggtgtgtgtgctcattacacagacatttaaggctcacctggccccagagatgcttcatgtgacagcagtaacagaagtacaatgtaattatgcctttcaaaacagccaaataaggaatggttgcatgcaatttgttaatctattgccttagttgaattgtgggtgatgtatttcctaattccaaaaatacttttgaatgcagtttcaaaattattattattattattagagacaaggtttctctgtgtagccctggctgtcctggaactcattctgtagactaggctggcctcaaactcagaaatccacctgcctctgcctcccaagtgctgggataaaaggcgtgcaccaccacttcccagccagtttcaaaattcttaacatatttatatttctatttcactttaaatatcgattttcttagattccccataagcatatcatgtctagtgacctttcaaaatgtatgggatgatcagtgactttaggcttctgaaggaaatagcattcaaaatcccatattcatcttcacaggcatccatgagtaatgggggccccaggtggactctgtcactcttaagaaattgggtgtatcatgccctgtaagtgtgttcttggaaatatagtaattacatgtcacaaaagcctgggagaatccaattatcttgcacactagcagagggaagtctttccactttagtgctcagagggtaaaactaatcacttaggaaattattaatccacctattcaattgcttgcagtataaaaatggggatttaaaaaaaaggaagaaatgctgggcagtggtggcgcacggcttttatcccagcacttgggatgcagaggcaggtggatctctgagtttgaggccagcctggtctgcagagttccaggatagccagggctatacagagaaactcttgtctcaaagaaataaaaacaagcacaaacaaacaaaagcaaaagagagagctagagaaagctttttaagcagctgagactcaagtggtaaagtttctgtgcatgagaccactaccacataaaagatgactgtgatgttacatgcctaattctagtgctgtgtgtgtgtgtgtgtgtgtgtgtgtgtgtgtgtgtgtgtagatggaagactctctggaggtcactggccagcctagacaaacggatggatgggcttcaggttcaatgagaccctgcctcacaaaagaaggtggagagcaatcaaagaaggcatctgaaattggcctctgatatccacacagtgcacacagccacaggattacgtataccgcacgcacgcacgcacgcacgcacacatgtacacttctaaagcgaggctccggatgacttggccatactgtggtgagatttacagataaagtacaatctctctggctctaactgggcttttttttccttcttcttccatcttttttttttttccttcttcttctatttcagcctgtcaaattctgtttaggacacacaatagcattacttataatggggggggggggcagacccttcggtaaaagagcccaccaaccctatttataaaggttttcaaccacctcctccccaggtgctagtggtgtgcttcagcattttcgggggtctgatggcgtttaactacagccgtgcgctccaggtgtgggccatccctctgctgctggttgccttttttgcctgcgtggtggctcacagtttcctatccgtgtttgaaactgcgctggatatccttttcctgtgctttgctgtggacctggaaacaaatgacggatcgtcggagaaaccgtactttatggacccagggtttttggtaagcaaacgtttcatctcctgttgtaatctctccaccgactagtgttgaagactcacgtacagggaggagacacacccagcctcctttctggtctagagggctccaaggagtttctacttccacctggggggtgggagctcagctgtcagacacggaaccatttccccacagaaactcccagtccagaggtgagaataaaatggggcgtgtaggctcttccactgcagcatacccaggaacacagcggtagctggtacgtctttgacactaacagcctgatctgttatgtctacaatgtcttcggccacttctgtctgggagagttgatatttatgtaaagtatcttgcacatgcaagcatacccacaaagctttgggtagagcacaccgctgggcagaccgctcacctctgttgccaatactaacagcccttgggccccttgctaaccaggcacaccctcagcaaagccacttgtatctggaactaccaggcagttgtttccaacagctttttgcaacacacaatacattgctcgtcctttgccttatcctccgcagacaggacacatttcaacactcctcttcggcggttctggcagggaaggggtgttaagtgacattttagtaattttctttccttttgtcgccataaaaattaagtgttaagctcttttggccttaaacattcagagcactgtcatttcggcaggtactggatttcaacacttcctatgaatgaataaatatgaatgtgctctccactcatagaaacgtaagatgtgatttctgcccacctttatctactgggatggatgcattaaagctaacctggtctactctcctcgacttgttaatttccagttagaatcctgctttgaaatctaccttactatgcacacaaacattttcaatacacttggaaaagcgctaaaaatccaatcccctcaacctgtagggagacagcctctagtaaacagatgctgcaggcacatcactggggtctttcgttcttttgtttttcagagtgttataaaacggaccaacaacttgaacaatgccaagtctcaaggacaaaaggatgctttaccaaatgaagaggggacagaactccagcccattgtgagatagggaccaagagaactttgactacctgtgacaccgagacaaagtctacagctgttttcacgtgaactagagcacggaagatgttaaaactatgtctatatgcatcaatttaaaaggcacaatattggctgggcacagggacacacatctgtaattcaaaactggaagaggctataaggctagcctgagctacatactcagatgttaaatgctagcctgaatgctacatagagacctcatataaacaaacaaacaaataaggttggctcactggataaaggtgccagttgccaacccgaggaactgaataccccaggacccacatggtaaaaggagagaatcagttcctctaagttgtcctcagagctccacatgtgaactgccccgagtgcactcactcagccccaccaccaccaccaaaaaataaataaaaatgttaacacctcacctttgtttgttcatctttttcttttctttttttttttttttaaaggaggattttgttagcagaaatctaacaaacctagattaatgctcttgtgcagggcaggcgtttctctcattcttcctagcctggacacatgctacgagaggctatcagcatgccaagttatagctcttagacttagtgagggaaggaaggtcaagagcagacacacacaggggaggctgctgaacacgaggagacccagccggctgcaagcaggcgggagtttcacacaccagcaaacattatagaaaggtgttgctcaaccaacccctgcccaaaatgagacttgtctgacagctttttttttttttttaattattttttaaacataccgaaacagaagatcttttccttttaaaagccctaagcaaatggaaactttgaacatgaggacaggagcctcgtgggcccagatgccgtgtggaactcccattctaacaggaaacacaatctgactgacttggcaggccagcacgtgagatctaatacaaggctccttccctttgctttcctaaccacttttgcaatttgacaagaaacagcctgacagctcaggaccactttagatattttttctttaatagtaccacagaattcatttagctcccagtctcctacagtgatttacagggcactcccagaagcatctaagcaagccaccacaggaggaacaagcatacatcctttctgtgggttcaacatctcttatctgtctttacaaaaccacccgaggccatcagtcagccttgacctgagacaaggtcagagggtgtgaccgagcagcttcccccgtgacagcactgccctttcccacacttagctgtgggttagcctgctctaatcaaacagcacacctcatgcctggctttaggatcatttacatgacacatgtaataactcccccttgcgtttcagagaattccaaatcgaatttcagataaacccagggcagccaagttgtagtagaacaaggaccaggtaaatcttggttgcccctttactataggcaatgggcatttttcttcttcgtttggttgttgtttctgtagctttaaaacaaggtctctgtagcccaagatcatctcaaactcagagaaatcctcctgcttcagcctccctagtgcatacccagcttagattcagtctccaatgagtgccgtattgtatgaattaaataatattagaacactttctctcagtgcccatggaacaaggcctctggtttctcaccttactctgcctatgtagaagagagccagaaaataaccagcctgtggttcatatgaatgttcaaaaaaaaatatttatttataaaaaatacaatgggataagtttatgctgagaaacgcagcaataaatacagttgaaggaaacagagcgactctacagtaatacattggcacaaatgaagtctgcaggcacaccacccaaacctgcatgtcctcggccatttctgcatgcacgcctttcgaagcgccactcgggagagacctcgtcagcttgggaaaagaatgagtacacatgtaatcacaaatgcacactgatcatgactttatttaaaacttagcagacaagactgcagaagaacatccacgtgtcagggtctaaagctgcatctcagattttagttggcaaagaccacatttagcaaatcaactttttagtcttccacatacaagccagatacgtactaaaactgtaaaaaaaggagaaaaaatagtttcctattgttcgaaaataccagtttatgtgtaagtgtaaaaaaatgcatagatagatcttcaacgaaagagctggctgtcctggagaatcgttccgccctttccatggtacagacgcgagttactggctatgcagtagggctcccttgctacagcactagaaggcagctatttagggaggaggcaggaaaaggagaaaggaatgtacataaggcatactttaaaggtacaacaagcataatagtgtttcaggaagacgagagaagaattattcaaggctagcttgggtctcactggataaaacaatggactaaatactgcgctcctgtgtgtgactctaataatcaatgccctggtcgtcgccatactggtactcccgagggtagtcgtctgggtactcgccatgatattcatcggggtattctgcctgataatcgctatcactgatttccgacccattggtgcccgtgccctggcttccgttgtgaatgacaggttctgtgggtgcggcacagtacttggggtcatatacttgccgcccaagcccatacacgctcattcctttctgggaagcaactttgttggtgcccatctgtagagaaatggtcgagttgtccactggctgtaatgtcagcttctggtcatagatgtctcttctggtgcccggtgctaacatcccagcctggtattagagcataatggtacacaaggtaagataacagataagatctatacttcttaacactgtctaaattattaaattcacacagaatgcattaacataaaaactttcaattggttctgacgtgaccctaacttactaaaatattcttataccactcatatttatgacgggattcgttggctcttgagctgctgagttgagccaggccttcttccttcaaatctctgcccactgttaagatcactatatggtgtcagacaaattaacctaccttgagtttaacttcctatatgtaatacagaagcaatacgtcagtctactaagtgagggacaaaggaaaaccaagcccagggctggcgacaagagctctgtggttaagagcacttgtctgtcttgcagaggacccaggaccagttcccagcacctaaactgtaactcagtttcagggcatccatccattcctgacttccaagggtagcaggcatatacaaggctcatatacatacacacaggcgaaatagctagacacataaaaaaaatcagataaactacatttttttacacatattgctgaattacatatgaacatggtctattaatgaccacccaggtctccaattgtaaaaaagcatccatgccttcaacaagaccaggctgagcagatctcagggaccaagtcttctcaagaggctgccacacaagatctcccccacccacagtcccacctcagacctgctcctctctccctttcacagtgggtaacccacacctcagcacccactgctgtcaagcacacacttgagaggtgagtgagtgaaaaggcaaacacgagagaccgccaagagaaccaactgcaggtgacccggagcgctccgctccacacggggaacgacagatgtcactggaaaaacaggaaagcttaccaaaactccgtcccacgatttttagatataaaatcctgatgctttcaaacaattcctggtatttcactgtttttactatttgtgtgtggggtggggaggagtggagagggcactagacaaacctaggtccagagtccagggttatgtgaatgtgaaggctgaagaacaatgttgtagagtcgccctctccttccgtcttcatgggttccagggatcaaactcaagccaccggataaccgcctttacccggcctgtccctctctcccccatcgtgtccacaccctcatctatctcaaaacctgtggtgactaattttggctttcaggtagacacacctgggaactgtagacctcaatgaaataattagctctatcagattggcctgtgcgagagtctgtggggcattttctgaagtgctaatggatgctggaggctcccaggcaggtaggcctggctgtctaagaacggtagcagagcaagcaagggaagccagcaggtgacactcctctctgcttcagctcctgcctccaggttcctgcctcggttggcctatggcatggaaacgtaagccgaacaaaccctttcctccccactactttaaaaattatttaactaccatttcatatgaattcatttctgctaccgtaatgtttcataaaaattctgattaaacagctcttaccaaacagccaaataatcttacatatccacctaaatgggcccctttaaaaacaaaaccaaaatggggcaggggagaaccaactatcctttccttggcttttggagcaggaacatatataaacatcacttttttcttctggctaggcagaaaggccagctgatcttattgccaaccaaaccattagtcacgctacactttttaggctgcagaaagggccctttgattattttgctctctcagcaaaatctactttcctgaagactaaaaataccatggaagaaataccatttgagagtccagctactcactattgggtcagcactaacttagcatacccttccgcgccctttgcttcaagtgttaaaaagaccccgcttacctggctggcccctttgttggtgcccatctgcaggctaatcgtggtctggtcaaagggtttgtccgtctgcatcttgggatcataaagatgcctccgagtcccataggctgtcatgcccgcctggctggcacatttgttggtacccatcttttaagttaaaagatcagcattagttatcagaagtcaacagcagcatacgcacaagcctacgttctgtgtttctaaggagacgtagagcacagtcagggggatgtagctcagagccggagtcacatacgaaagatctcggttcaattcccaagcaccgaacagaagtaagaaaagccatggacttataaattcctgagctaaggcatttgctcaggcaactaggtatgaactgcgccctgtgcttcggaaaagaactgtgtgaaggctaattttaaaagaaaaattccaaactctcttacatataaaaaaactcagagcacagttagctgcatgtaaacttgcagaaggagatgtactgttaaataagaagtcactgcattggcacaactatggctaactaaacgtccctggcgctcttttctctgcagcataggtaccagattaaagtgtatcctccggnnnnnnnnnnnnnnnnnnnntggaaaacaaaaacaaaaacaaataaagtgtatcctcttcagagaagccactgcaagtggaggagaccagacaacaaggcttctgactacagcgatagctgcatccaaccttgttcttgttgtcagctacaaaagtcaccctccagaactgcataatggggggctggggggggggggtaggaggagaggaggaggagcagcaacagcagcaatttatttaaaaaaaaaaaatcttgtactgtttcaagtaagttttacaactctgcgcaggctgagcccatagctatcttccactgcatgtgcagcctgtgcgctcagagttaaaacaaacgccaggcacttaagaaccagcaacattttcatggggggaaaatacatttatttcctcaactctctggccagaaccagaacaaggcagtaagaggagcatgaaatgaagcaggaataattaacttctctcccctgctgagaactataaggcccaggagcactgagagcagcctgtggaaggaggagggcccctggagcactgagagcagccctgggaaggaggagggccccaggagcactgggagcagccctgggaaggaggagggccccaggagcactgagagcagcctgtggaaggaggagggccccaggagcactgagagcagcccggggaaggaggagggccccaggagcactgagagcagcccagggaaggaggagggcccctggagcactgagagcagcctgtggaaggaggagggccccaggagcactgggagcagccctgggaaggaggagggccccaggagcactgagagcagcccggggaaggaggagggctgtttccaccactcatggttttctccttaaaaatagtttttgactctgattttctgaggcaatctcacataaatgcaggctggccttgcactccctaggtagtcagagataatcttaaagtcctgatcctccccttcctgagtactggggtcaccatgctcaggggacacttagaagtgtttcattactaaaagcaaaacccctgcactagaaaagactcacacaaatcatgtaagccccacccccaaagagaggagagggggaaatcagtgcaacattaacgcttgtgtaactgcaactagggtttgcaacaggcacctgcaaatatccttgggttttatctgcatatgtgtccctgtgtatgtctggagccacacacacacacacacagaaacccaccttttacaaacagatacacacctatttagaagttaacagtattgtataactttgtctcttaacctgtcgttcaaacactaatgtaaatttttaggctgcacgctccaacttgcaaggagttctaacttactaactgaccagtatctgggctcttctttccaatttcccaccatttatgcaatgtgtacttttaacaattaaaggcacctcagtcaagaggtcggtacgccaagtccttagcttgtgttctgatgacactctccagggagactgtacaagtcacttgaaccaagtgcttccaagcactaagaagacccagtcggcaaggctgatacagcaccacacattaccagtgtataatgactttggcacgctggtctttgtatacattgcttcccttggtcgataacatctaagaatttataaagtgcattttctttcctttttaaagataatatggttatctttataaactatttaatttcctagacaaacaacagtcaagctggatgacataactgaaatattttttaaaacagcatcattttcttacacctactatttaattttcacctgttgagacatggtctcattctgtagaccaggctggccttgaactcatatgtagcccaggatggcttccaacgccgagcagtcctcctaccttagcctactgcatgctgggattacaggtgcattgagccattgccctacaggtcttatatacacaaaaactgtgaaatccatgtatatatccaagcaatctaaattatggaacttccatgcatattttactaatgagaggcataacactttgtgtggcaatagttaatgactttctgtagatgaataataataatatatttaaaaaaaagagtatcacaccacttacctgtaaaccaattacactctggccagcctttaatttgccttcatcaaaacgtcttgtttgtttttctgcatacttaacgccaatgtcaatggttgtatggaatccttttgttttcgcctagacagaaacacaattcgccacctgagctggaacacagagattccgccaccagcattttgaagaggaaacattgaagaaatgatgtccacagacagccttgatggtgagctcatgtcataccagaggaagaaaacacacttaggtctatttcaatgataacactgtaccctctgaaatgcgagggctctaattaacctatctagcccaagctgatgtcagcagccttttcacaaagctagcaattacagaagacacaggcccctccccacccggtctcggcatccctgggagaacaatgatgtcattcatcacctgtgtgcagggaagtttctctaacccagtgaagagtgcgtacgtaccagacctgctagagccaccagcgtcgtctgaacctgggtcatgttgccattctcaaagaggtcgtttgcttcaaatatatcatggggcttcataccgtaagcctggatagctttaatgaagttgccgatattctccaactgtaaacagaaagaataagggttgagactcatcagtcttgatgattggttacaagacaccagacagaggctttttggtgaggattctctatccgatacatagtgagcacacagcttattctctaaaagggcttataaaaagaacagtcttctgaaagtacgttttgtgtgtgtgtgtgtttttcctcttttgccgttcttgctttgagacagaattctcatgaagctcaaacctatttaaaactggtcacagagccaacgaggaccttggatttctggtccccttgctcagaccctaccttccagacctggtgctattatgtaattagatgagtactacccctccctatttatgctgtgctggggatcaaatccaggacttcacgcatgctaggcaagcactctacatgggaccacaagggcaaaactggccatgtgcatatgtgtgtgtagtatgcatttatgtatggtggtgcgcgtggttaggtgtgggtgtctgcttgtgtgtgtgtgtgtgtgtgtgtgtgtgtgcgcgcgcgcgcgcgtgtgcgcacgcgcgcgcgtgtgcgcacgcgcgcttatgtgtgtactcgcatgtgtacatttgcaggctaaaggttgacatctgacatactccatttgatatttgtgtgcactgtagcttggagttactaggcctannnnnnnnnnnnnnnnnnnnnnnnnnnnnnnnnnnnnnnnnnnnnnnnnnnnnnnnnnnnnnnnnnnnnnnnnnnnnnnnnnnnnnnnnnnnnnnnnnnnnnnnnnnnnnnnnnnnnnnnnnnnnnnnnnnnnnnnnnnnnnnnnnnnnnnnnnnnnnnnnnnnnnnnnnnnnnnnnnnnnnnnnnnnnnnnnnnnnnnnnnnnnnnnnnnnnnnnnnnnnnnnnnnnnnnnnnnnnnnnnnnnnnnnnnnnnnnnnnnnnnnnnnnnnnnnnnnnnnnnnnnnnnnnnnnnnnnnnnnnnnnnnnnnnnnnnnnnnnnnnnnnnnnnnnnnnnnnnnnnnnnnnnnnnnnnnnnnnnnnnnnnnnnnnnnnnnnnnnnnnnnnnnnnnnnnnnnnnnnnnnnnnnnnnnnnnnnnnnnnnnnnnnnnnnnnnnnnnnnnnnnnnnnnnnnnnnnnnnnnnnnnnnnnnnnnnnnnnnnnnnnnnnnnnnnnnnnnnnnnnnnnnnnnnnnnnnnnnnnnnnnnnnnnnnnnnnnnnnnnnnnnnnnnnnnnnnnnnnnnnnnnnnnnnnnnnnnnnnnnnnnnnnnnnnnnnnnnnnnnnnnnnnnnnnnnnnnnnnnnnnnnnnnnnnnnnnnnnnnnnnnnnnnnnnnnnnnnnnnnnnnnnnnnnnnnnnnnnnnnnnnnnnnnnnnnnnnnnnnnnnnnnnnnnnnnnnnnnnnnnnnnnnnnnnnnnnnnnnnnnnnnnnnnnnnnnnnnnnnnnnnnnnnnnnnnnnnnnnnnnnnnnnnnnnnnnnnnnnnnnnnnnnnnnnnnnnnnnnnnnnnnnnnnnnnnnnnnnnnnnnnnnnnnnnnnnnnnnnnnnnnnnnnnnnnnnnnnnnnnnnnnnnnnnnnnnnnnnnnnnnnnnnnnnnnnnnnnnnnnnnnnnnnnnnnnnnnnnnnnnnnnnnnnnnnnnnnnnnnnnnnnnnnnnnnnnnnnnnnnnnnnnnnnnnnnnnnnnnnnnnnnnnnnnnnnnnnnnnnnnnnnnnnnnnnnnnnnnnnnnnnnnnnnnnnnnnnnnnnnnnnnnnnnnnnnnnnnnnnnnnnnnnnnnnnnnnnnnnnnnnnnnnnnnnnnnnnnnnnnnnnnnnnnnnnnnnnnnnnnnnnnnnnnnnnnnnnnnnnnnnnnnnnnnnnnnnnnnnnnnnnnnnnnnnnnnnnnnnnnnnnnnnnnnnnnnnnnnnnnnnnnnnnnnnnnnnnnnnnnnnnnnnnnnnnnnnnnnnnnnnnnnnnnnnnnnnnnnnnnnnnnnnnnnnnnnnnnnnnnnnnnnnnnnnnnnnnnnnnnnnnnnnnnnnnnnnnnnnnnnnnnnnnnnnnnnnnnnnnnnnnnnnnnnnnnnnnnnnnnnnnnnnnnnnnnnnnnnnnnnnnnnnnnnnnnnnnnnnnnnnnnnnnnnnnnnnnnnnnnnnnnnnnnnnnnnnnnnnnnnnnnnnnnnnnnnnnnnnnnnnnnnnnnnnnnnnnnnnnnnnnnnnnnnnnnnnn

SEQ ID NO: 821 - DNA, 2285 bp, Mus musculus
acttctaactccaggcgctggcaacgggcccaggcgtcgcacagtggtcaggagcacttcctgggaaccggtgctgcgcaggtgccacccccgctcccagcaggtcctcccagcctaaagccaccacggaaagggcgtgtctaggggaccagcgccctggacctctaggaggcgctgagccctgctcgccctgccgcccctcctgggccacttggcccggtcgccgcacctctgtcccgtgtgcaaggcgaccaccgccgccgccaatcccagatgccgggtaccatgcagtgcttgggcgccgagtacctggtgttcatcatgggttattcggtggtggccggggcagcaggaagactcctctttggatatgacagctttggcaacgtgtgtggcaagaagaactccccagtggaaggagcccccctctccgggcaggacatgactctaaaaaaacacgtgttctttatgaatgcctgcaatcttgaagtcaaagacaggggtcttggtcccacagccctctgtgtatccagctgtcctgagaagcagctggacactctggaagaggtccagctttttgccaacatcaacgccctgtctctggccatgttgttcgccttccggttcatctcgacccttctgatccacattatcatctccttggtcattttgggattgctgttcgtctgcggtgtcttatggtggctgtattatgactacaccaacgacctcagtacagaactggacacagaaaaggagaatatgaattgtatgctagcctttgccatcatctctacagtcgtgacagtccttctcctggccttgatttttaccctcaggaagaggataaaattgacagttgagcttctccacgtcacaaacaaagccatcagcagctgtcctttcctgctgttccagccactgtggacgtgtgccatcctcattttcttctgggtcctctgggtggctgtgctgctgagcctgggcactgctggtactgcccaggtgatggaaggtggccaagtggaatataagcctctttccggcattcggtatatgtggtggtaccatttaattggcctcatctggactagcgaattcatccttgcatgccagcggatgactgtagcaggagcaatggttgcttgttatttcaacaggaatcaaaatgaccctcctgcccgtccaatcctttcgtctctcttcgtacttttctgctaccatcaaggaactgcggtgaaagggtcatttttactcactgtgacaaggatcccaagagtcattttcatgtgtatttatagcactctgaaagagccgcaatggaccagagtaaggatgcagtttgaggacctggatctgagtcaggatgcgtacactgcaactgccattaacgggacagacttttgtacatccgcaaaagatgcgcacacaatcatagccaagaattcaagtcatctcacgtctgttaactgctttggaaactttgtcattttcctgggaaaggtgctagtggtgtgcttcagcattttcgggggtctgatggcgtttaactacagccgtgcgctccaggtgtgggccatccctctgctgctggttgccttttttgcctgcgtggtggctcacagtttcctatccgtgtttgaaactgcgctggatatccttttcctgtgctttgctgtggacctggaaacaaatgacggatcgtcggagaaaccgtactttatggacccagggtttttgagtgttataaaacggaccaacaacttgaacaatgccaagtctcaaggacaaaaggatgctttaccaaatgaagaggggacagaactccagcccattgtgagatagggaccaagagaactttgactacctgtgacaccgagacaaagtctacagctgttttcacgtgaactagagcacggaagatgttaaaactatgtctatatgcatcaatttaaaaggcacaatattggctgggcacagggacacacatctgtaattcaaaactggaagaggctataaggctagcctgagctacatactcagatgttaaatgctagcctgaatgctacatagagacctcatataaacaaacaaacaaataaggttggctcactggataaaggtgccagttgccaacccgaggaactgaataccccaggacccacatggtaaaaggagagaatcagttcctctaagttgtcctcagagctccacatgtgaactgccccgagtgcactcactcagccccaccaccaccaccaaaaaataaataaaaatgttaacac

SEQ ID NO: 822 - protein, 558 aa, Mus musculus
EALSPARPAAPPGPLGPVAAPLSRVQGDHRRRQSQMPGTMQCLGAEYLVFIMGYSVVAGAAGRLLFGYDSFGNVCGKKNSPVEGAPLSGQDMTLKKHVFFMNACNLEVKDRGLGPTALCVSSCPEKQLDTLEEVQLFANINALSLAMLFAFRFISTLLIHIIISLVILGLLFVCGVLWWLYYDYTNDLSTELDTEKENMNCMLAFAIISTVVTVLLLALIFTLRKRIKLTVELLHVTNKAISSCPFLLFQPLWTCAILIFFWVLWVAVLLSLGTAGTAQVMEGGQVEYKPLSGIRYMWWYHLIGLIWTSEFILACQRMTVAGAMVACYFNRNQNDPPARPILSSLFVLFCYHQGTAVKGSFLLTVTRIPRVIFMCIYSTLKEPQWTRVRMQFEDLDLSQDAYTATAINGTDFCTSAKDAHTIIAKNSSHLTSVNCFGNFVIFLGKVLVVCFSIFGGLMAFNYSRALQVWAIPLLLVAFFACVVAHSFLSVFETALDILFLCFAVDLETNDGSSEKPYFMDPGFLSVIKRTNNLNNAKSQGQKDALPNEEGTELQPIVR

SEQ ID NO: 823 - DNA, 94911 bp, Homo sapiens
gtcattatgccttataacttagtatataccccatgtgtactacagtttttattatgcaatgtttgatatatgcaaaagaatatattaacataaataatgtaatgtgacatatataatcttttgtaactaaaaaatattttttaaccaaactgaaagtccctcagggctaaaggagagactgtgttccaaggaacacatttaagaagggagcctggtggctatactgttcccttgcctcacctccccataagaattttcctgctggggctgggcatggtggctcacacctgtaatcccagcactttgggaggccaaggcaggtggattatctgaggtcaggagttcgagaccagcctggccaacatgacaaaaccccatctctactaaaaatacaaaaattagccagatgtggtggagcatgcctgtaatcccagctacttgggaggctgaggcaggagaaatagttgaacctgggaggcggaagttgcagtaagctgagatcgtgccattgcactccagcctgggcaacggaacgaaacttcatctcaaaaaaaaaaaaaaaaaagtattttcctgctggaatcttgctgcccccaccaagcctacccttgctccctgctcttcagaggtacaaggggaacacaagcccctctccttccagtcctttgagcacaaccaagacagggtagcattttctaaaagctgttctacaaagtgggagcaaatgagaaagatacaatcacagaaaggcaaacggcttcttggtgtggcatgctgggccctaacggctgagttagttctgccctcagaagtataccttctctccctccctccttctcccccttattttcatcctccagtgatactacatggctgggggtcccctgctgctccatgcccctagccctttagccatgctctctcttctgcctgggaagccctccccacctttctctatcttgccatttcttgttcatcttgcaccattcaactcaggccccctctcccaggaaggcttcttggaaccctgggactgggcaaagaacccgcatcagcctgcctcatcattaaccctcaactgagcttgacctcgctggagtgggcaaatattccttcttggtgttcgtgccccttgagttggcccaagtcctggcacaaagcaagtgctgagtcaatccctgttgaataaagataggctaaaattaatcaaggttcccccagagaccagatttctaatccaaagatttcaaggagaaaagaaggtcttctgaggctgaaacttcctcatcctgaaatgaccaggatccagatttaaagagctgggagtcctttgcacacacaccttgcttggtttccttccccccacctccctccctgtctcagccaagtgctccccagtgcctccttatctatccagtatatcttgggccatttctggaccaagtacaaagacccaagacctcttgcatccttcatctcatctctggcttccagtctgaggtacaagcccccatggctgacaggaaaggcaagatggggaaggatctggtccttctgagtcagtgatcctgcccgcactggagcctctgataactgactcttgtaaggtgagccccttcttagtctgggacgagaaattgctccatcagagtctaacatcatggtattttatccagagggcatcaggcccaaagcatggtgggaactcagccacaggagctgatgaggagggtaaggaagcctgggaaaagtgggatgaagggtgggaagttctggcctttcttagtgctggccccaaagtacagtgtcaataagattcacaggctgaagcttaggtcaagcttcagtctgcatctgggagacctgccccaaagaggtaatagtcagacacttgaaagcaaagcaggcaacctgagtggccctaactgcatctttgtgtgaccagattgggacagaagcaagatctcaacatcttcagagagcacctagaagttttagaaaaaggtgccaaaggcctttggaagagatgcagattagaatataagacaaacatgaaaatcatgagaaagttaggaacagatgggcaggaggggaatgtgaggtataggatgaagaaacacacagagaagaggaaaaactgttaaggccaaagtgctacagaagctccaggggcctgcatggggttggagtgaagagattgagggtgggaaactgtgagagcttggcaccttagctgagccaatagatctggagatacaatgatcctaaggctaagtaatgatgttgcctcagtgaggaatagagagggtcaggcatgagtgcccaagctgtggggggtagaggggagtaaaaaaaaaaaaggcagaaacaaaagaaacaaggtaggtatgttcaagagcaggtgcatccatacagaagtgttaagcatgtctacttcccaagtggaagctcaggaggtggcatgcattgtcatcatctgtgggagtacagtcagggtggtgggaaaaattgtagaggaaaaattataaagatagttatagaaaataaacacaaaccctcctggaaggctggggggtttgcatggcttcagtaccagatttggctgaaggcagcctaatcctctttacctttagttgatagcaaaaaagcaaacaacaagggaatgtgtggagttgaaatagcttgtttactcttgtggtcctaagaccaaactgatcaacctcaggtgcataattgctctctgctggggggtgggggggtcggcaatgttaattaccctctagtggtgtttactcaagacctttgtcatttaatctgtactaaataaatgcaaactttgccagcttatggggcaatgctccagactcagaacagagccccttagctggactgacagctgtgttagtgtatgtctctcattcgttgctgggtcagggtctgcaggtcggaccctacagtcatcgtgtgtgtctgtgtgtaaagttagaaaaataacaaaagtagagaaaatagtttaatgaacccccagcaatttaacgaagtttaatgaacttcagcaattatcaatggatagtcaatcttgtttccccatacctccaaccattctcctttgccctggattttttaaaaagcaaatcccagagagcatatcatttttggtatgtaaatctaaaagataaagactcccttattttagacttagccccagtgccatcatcagacccccaaattctttaatataaattagttaatatcatcaaacatccaatcactgcttacatttcctacagtgtcctctaaatgatctttcattttttcatttggtttaatctggatctaaacaatgtccacacattgtaattagttaaaatattggtttcctttaatctgtaggttttccacatactcttttctttcttgttatctttttgctgttgtggtggagattgttgtcaaaacacaatgtcaaaatcgattttcccattcttgattttgccggtggcatccctgagatgtcatttgacttgttcctctatttcctatatttatagcaaagttggtagtcagattccactggatttttctggcatgacaatttcacaggcagcgatacgttcttccctgggaggaggttgatggctgactgcccctcttttatgatgtttggaaaactgtgatatcctaattcttttattccttctgcttctataagccacaatatgtctattaagagaaacttccctcattgattatttgattacccttaagtattgttcgtataagagaggtagaatatgtgtttgattctttccctttaagtttttgaaatgagttggtccctagaattttctagaggcaatcaataaggatttattttcatttggtattattgagaatttatgaatatagacatattcaatgtatttcaaggatgggatatttacaagggttttagggtctggcataagatgggtttttcaaggcagggatgctgatttaattggccagtttgttatataataagttgagaactggcgagcacaatgaagggtaggaagttgaagcgagttttgaagggcacagtcatgtggtaacccagttgagtgatctacgtattatcctgatgacagctattaaccattagagcctattgctctaataggtttttaggaaattcctaaaactggatttttttaaaacaaataataaatttatctgaaatgacatcttagttcacaagtgtaataatagttctttcttccttttctttttctccagtacaatctttacttggttttggtatcaggttgatgctggcctcataaaatgaccagagcaaattttgctctatttctatttctggagcaacttgtatgttatagaaattaactgtttcttaaaagtcccttaaaagcctctagatctgagttggggtggggggagtttaggagagatatttggctgccatttcaatttaccaaacatttagtggtttattcaaattctctatttcttcttatatcaattatggcattttacatttttaggaacataaccattttatttaggtttacgtatattagggctcataacactttttaaatgttttaatatattttgttatttcctccattattctgtcttattttgagtctttcctcttttttcctgatcagtcttgccaaagtttggtcttttaatcttttccatgggactgacttctgttttattcatcttctctacttttctctgtgtcactgatttctgcccatatctttattattgcctttcttcttgtttcactgtgtatgctgttgcttcttgtgttgaatgcttagctactttatttttaaccttttgtttcctgatagatataacccatacagttccatctaactggtgttttagctgtgtcccaatttgacatgtagaatttttattaacattcaattttaaatatttcttaatttcctttatgactcaaggatgttgtctagtaagatgttttttggtttccaaatgaggtttgggtagtttttggtttctgtttgtttgtgggttttgtttgttttttgctattctgctgatatggtttgggtctgtgtctccacccaaatttcatgtcaaattgtaatccccaaattggtgggaggtgattggatcataggggctgagttctcatgaatgggttagcaccatcccctcagtgctattttcataatagtgagttattgtgggatctggtcatttaaaagtatattgcaccttccccatgtctctctcctgctccagccatgtaagacatgcctgcttccccttcgccttccaccatgaatgtaagtttcctgaggcctcccaagaagcagaagccactaaacttcctgtatagcatgcagaactgtgagccaattaaaactcttttctttataaattacccagtctcgggtatttctttatagtaatgcaagaatgaactaatacatctgctgtattatttattgtatgtgaaaaattaccacatatgtagtgacttaaaacaacatgcatttattatcttatagtttctgttggtcaggagtctgggcacaatctaactgggttctctttcttttgtaatgtcatgtaatcatgggaatgactttccatcacatttaccgtgtatttttggtgtattaggggtcttcagagaagcagaaccaataggatggatggatggatgattgatagataagatagacagactgatagatattataaagagatttattataatgaattgactctcatgggattatggaggctggcaaatccaaaatctgcaaaaccagtgttctaatttaagtccaaaggctagaagctgctgtagaacaaggaaatgtcaatgttccagttcaagtccaaagaccactaggatgctgtagacggacagccaatatcccagttctaaggccatcaggcaggaaaatcctcttactaggtgggtggagtcagccttttgttctattcaggccttcaactgattggatgaggcccacatacattagagagggaaagctgctttactcagtccaccaatttaaatgctaatctcatccagaaacacactcacagaaatacccagaataatgtttgaccaaatatctggataccctatggctgacctattcaaaataatacataaaattaaccatcataattggttgaaaggtacaggtcccacccatatctgaagaagggaactacataagggtgtaaacaccaggaggtggaaatcataggggccttaaaatctgtccaccacacatactgttattcattacttctaattttattgcactgtgaaatttattgagcctccctttaagatctaatacacagtttatgtttttactttaatgtttcacatgtacctgaaaagagaaaggacatgtattcactgtttgatggaaacgtatatgagttataaatatctaatggctcaagtttattaattaaattgtacagaccttgtatatttgctttctgtgtgtatgtgtgttgggagaggagaggaagtatctactgtctacttgatctattggatactgagaggagccagttaaaaatctccaactataattctgatttatctgtttctgcctaaatttctgttagctgctgcttaataaatattaaagctgtattgttgggcacatttatgacctcccttatgaactttctatcttaagttttattttgtcaggttttaaaattactacatgagctttctttggttcacatttgcactatatccttttcaagccttttaaccttttagtgtctgttttacacaagtttcttgtagaaaacatattgctgaatcccttgctttcattcaatttgaaagactgtttttcttaattggttagtttaagccacttacatttattgtaattgctgctctatttaggaggcagcatagaatagctctaagtatggttctaagtatgggttctagatccagaccacctgggttcaggccttggttctgccactttctagcaagttagttaatctcagtttcatcatctataaaatgaggatgatgaaagtaatagtaccttcctcataaggttattatgaggatcaaataagaaacacccagaaaagtatctggaacatattaggtacactgaaagtaaaaattattattagtaattttatttctgctatcaaatttcatatattctaattattgcactttctttttattcctttttcctctgctctcttgcctttcatttgataaaattttcttccactgctttaaaagttacatgttttattcttttttaacggtagttacccttaagacctacattcacaaatatttatccctattgatttattaaagttaacaatttttttcgtcttcctcccatatgatagtaatttaacccagtactactctaagtactctaagtagtactgggttacttatctcatccattccagaatgagatttgagcccacatgtaaatcaacacacagcttccttcattgagaaagtcttgctacgaaagtgtcagctgaatcaaagagtttgcttatgacatagctgatatgcattctggtacaagctccttatctcttagagaacaattaagttttgtgaaccaccctttgaatggcactattttagatcactgtcctatcattttggcctctcattcctgagtcccacacccctcacaatattgatattgtctataattttaggtctgaatcattataaatacactgttctttgtttttagacttttgaaaagagtttttgtaagtcaggtttaatgaaatacagtttacatacaataaaattcaccttttctagtgtacagttctacaaattttgacaaacagataccactgggtcatcagtaccattctcaagataatggaatatttccatcacttcagaaagtttctccagattcccttcacccccagcacctgacaaccattgatctattttctgccttttccagaatgtcacataaatggaatcatagagtagcttattatatctgactttttttcacttaacatgcatttgagatcatccatgtttttgcatatgtaagaagtctgttccttcttaatgcttagttgtatttcatcgtatagatgcatcacagttatgtatagccacccaccagttcctggacacttgggtggttcctggtcttttttctaacacaacaataaattcagcctaaatatttggccactctcatgctatatctattgtatcatctcctgaatttgtttctcttcttgtttgattatgtcctccaagaatgtcattcaaatgaatctttcataagaatatttttattattaatacattctcacattctaatgacaatatggcttaatagaaaataagttcaaagttatgcttttaaatacttacatatagaaacattttgcttgagataaaccttttcaatctgaaggtttttttctaccttgaaatttatctccattatatcttcaaatatttccccttctctgtttttatatttcttcctttctgttctagttttaccctagatataagctagaaaatttacaaataagctaacttgttttttaaaacattttctactgcctctggaggtttgctgaaagtgctcttccaattactaattcatcgtcagctgcatcttttagactattgcacattactaatacgtagcatcaatattcattctaattattatttttatgcttaatatgttttagtttcatattttttcctgattcatattgctaatatcataactcattttaaataaatttatcatgcttatttaaaaatcttggtccatctgctctactgatcagtttcagatggcatatgttattcagttgtggtcttttaacagtagttgcactcctccagtgtctaattctttgtcctatgaattcatgttcccctggggtttcacctactctgtctgataaacatgcatccaggaaggcccagtgagtttgcagtgggagggtggtgtgagcccagaaggaaatcgctggcaccagagaaccactgtctatcattcccagtttctcccacttacccagatctttcctccagtcaggtttctacccttagggagaagcagcacctaaaggaagcaattaacctagcaaccctaagggtggcagggggaagggtagaggcttgattgagaggaggtggggggaggtcggcctgcagttttttttgtttttcgttttttaaattcctcaccccaacagtgcttttgcgctggtctgacactacctggaaaactatgccaccagtcgcttcagtggacactaccatttcaattgcgaagtcaggcaatgattgtcctaaggcaaggtgggagagaagtcagagtaaaccacctcgagagcgccggtctcccggagtgtctgggttcgactcctgcctccacaacttactgggtctcctcgaacaagttgcatcaccaatggccgtgcctcagtttccctcctccgtagattaggaataacaatagcagtgagaacagaatccagcacacagtaaatgctgcttacctgtttgctatgtggaatacgccactacactgttgctcggccctcaggaagggtctgctgagactttctacttcctgctcagggcagaggccgaccacccgcccaaggtcgtggcggcgccggctcagctttagtcgtcaaagtgcacatcctgggagccgctgcctcgaggtggttgaggcgagagggcagggaagcgtctgagcctcttcctcccaccagagcaggaccccagctgacagcgggtgagctgggcagaaacccatgccgggaagaggcggacccagtggaccgcagcgcccgcagtcgccgggccaggcgcagaggcgaacgggaggcggcgctgcaccgtgcccgcccctccccggcccggccccggctccagccccagccccagccccagccccggccccggccccggctcgcgggcgctgcgtctccgcgtacaggaggcggcggcggctcccagtcaccggcccccgccggcgagcgcacgatgcactgcctgggcgccgagtacctggtaagcgctcgcagcctcggccctcgggggaggagccccggggaagggtcgagtcccccgccttcacgcaccttccctgccggacgcttccgcctttcccgcgcctcggggatcccgcccccgcttagtaccttggggccacctggcggggaggaacctggaccctgctccagtgctggggcggaggcgggggagacgcgggccgcggggcgcaaacttggggtcgtcctcaggtgcacctccaggtaagcacttggcggcagggggcttaacatccgctccgcgcagagcaggtgtttcaaaggctgtgtgaaagagcttcaggtggccacgtaaaaaaataatattaattttaaaaatttagaaaaagattggttactttggcccctcttcgagtagatttgggttcggtttccaggttgagtccacctgtttatcttctttttctcaactctccctttttctggaaggtttctgcagaaggagcccctaggcaaagggagtggcgaccccagatttataggaaatgcacagatacggcatggttattcctgttctttctcttttggactggtttggtaagtgtgggtgcttggtaggaaagaggccagagtgtgtgtgcacgtctggaaataactctgtcccaaatgtaaatcgtagttggtgctgcagtgagagacttctgccgttaacccacaataaacatcagtttgtactcgggagaattcttgtcctagactcgctagaaaggctgtctttttgctacaggccatgttctaaggggtgactccattaggaaatgggaattaacagtttgcaatgtgattgctatttagtaaggccaatgtgtctccttttactctccgaacttactgaacagaagttcttttagcacctgccacacccccaaatcaaatattcctcaagcttttggtgcacctttaacaaaggaaaagccagggtaagcctagaaataaactgcatttcctttagctgaacatcacacacacacgcgcgcgagagatatgttgtgtttagcagccaacactgttaaccatagctaacaaggaatgatttttcccactctaatttcgaggtatgtatgattgctggtaaactccatcaggctatgcggttataatcctgagagagtctgttggaagccgaatcttgctgcttttatacttattttagaattgtaggtaacagcagaaaacgtctcacccgacattttcaaaggccactttcacgaaatcatccatgccaggataaggcatgctatttgctgcatggtaaatgattaatttatagagcagggtaataactaccagatagtaattacctttgttgaaaagaattccatctgaataggccctaaaatatcatgtttgttctttccaagtaagaaaggcatttgttcacttatgacccgtttcacatagacaggcttggttacaggcacagtggaaggttaggtctgaaacacataatcagatgttttttgttgcttacgttggaactctcccctaggagctgggagagacagtgcacctacaataccttctgcttaacttcgcagatggttggtgtttttatctgagactgctgttgtataaatgcagggagcagctggcctgccttgtgcctggcagctttgacctcaagctgttattgtgatttaatgatctgccgtagcccctccacagcttcaacctaggacctcactaccaaactctcagcccaacagctgagaatcctggggaaaatctttgtagatgacctatcacagcctgaagaattgtgaaccagctgagaggtggcacggagctggaaactgctttaaaattacatttcatttgcaaaataagtctgaagttttaatatatccaagttctcactatggcattctgttttaagagtcagagtcctttcttagctcactggcttttagtgtcttttgcaacattttttatttgcaggtatttaaaacagagcaaggagtgttttgtttttggacttttttttctgcctctgttgttcagctttcaggtcttgtgacagatgtcctgacttggtgatggtgtgccctgagttagggctggacaaaggcttgggggaaggagctgaaattataagcagagatggttcttgcaaatgcagcaccagcctgtgtttatatttgcattaaacataaggaacaaagtctcaaagtctggactatctctgcctctacttacccctccagtatcctctcctgccctgccttttcctatcatccctcaagattccattttcctgattttgcaggcacggttgacagtgactaccttggtggccaatgtactagaccaatgtacacacctcctatatcacctgtcatatagaatcgcaattgcatgtttgaaattaggacaatgaaggtttatagtagtagtttcttggaaggccgaggcaggaagatcccttgaagccaggagttcaagaccagcctgggcaataaagcaagaccctgtgtctacaaaacataaaaaataataatcataaagtcatagttttattaggagggactcaggaatcctcagaaaccactcccacctctcccacccagaaaaactttccattcttcaccacaggctttccaaaggaaagaatgatggtaaatggaaaacatcactttgttattagattactggtgagctgggcagaagcacatgacccctttcctccctctaaatccaaacacagtccagaccttactacactccaactcgaaaggacgagacaagcatgtcaaggcacagtcagcttgccatgccagccacattggcaaacagagtcacacctactccacagcctttaggtaaagggtgagtgacacacactactagcaaaggtgacccattcattctagaatctgaccagttagacttaggaggatcttggagagtgggaaaggacagggagcctccttccccaggaggtctgcagcccgtaagtcctgcttgccttctaggctgggttcctggaggcaaggagtaggttctggtcattcctgtgtctcccagtaagaaagtctcaagaacacactgggcacttgaagaatgtttgttattttgatttctaaattagtaataaatgcagaatgtctagaaggtatttgaatttaggacaatgtacctttgcagcataaggtatcaatactatatattaatgaatagtgtattatatctgttctcctggaatgaacttgtcaatatagagtattaaatggtatcctatatattgcatacagtactgggaaacttactaagtttgcattatgggaagatacatattcaatcttggcagagagcctgtcagtatgtattaatggcacagttgtttgaactgaaatttcaaatattccacattcactatgagagtggataaaaatgatgatagattgcaagatgttcttgtccaacagaattcctgtggtcctttattttgtatgtcttaagcagttactccaaaacactatttgcagattggtgaacagtgtttcagtacatatcaactgtgttgcttctgcagaatcccttaaaagtaagaaaagaaaaacaaaaaaagtagtagaaaaaaaaaaaaccttggggaaagaattagcatagccctgaagcagttaaattaagcaagaacatcaagggaagaaaaattgaattgtcccagtaaagttagaccaaaaagaaaaatgatagactcttaaggaaaaggttaaaaagcacagaggtaagaaaatggagagaaatctgtttcagtggattagattctctctctacctaaatgtataagtagcagaggagcaggatgctgatagatgggagttgctgacactgttactgacggagcaaagcgctatgatgctggagagcttcacgttccaccaggctccgttttatatcagcatctgcaggggtgtggggcactgtgcgctcagccctttggccaggctctcatatgcccccgtttttgccaggtgtttatcatgggctactcggtggtggctggagccgcgggaagactcctctttggctatgacagctttggcaacatgtgtggcaagaagaactcccccgtggaaggggcccctctttcagggcaggacatgaccctaaaaaagtaagtatctaaataagtccccagtctgtaaggaactgtacctcaaaactttgtataaattcatcatttggagcctggaaacttttcccattcaaaactctgtcagcctatttcataaaaaggaaggctgtgtatatagtacaggtaagagtacaagttttagaatcatagtcctaagttcaaattcagcccatgctacttttcagctgtgtgatcttgggcagagtacttaacctctcaaagcctagttttcatctctctaaactagttattatacctacctcacaaggttgttttaaggattcatgagacactgcatgagctaaagtataataaacgttaattgctgctattattctccataatgaatcagaatcatgttaccaatcgtatatgtttgaaccctacatcatccacacattgtttctacgtggaaatacccgaatgccacctggaacactggggacctgtgtcccacccctgccccagctatggcactgtggtgttgcattcttccccctactcccttaccccatctcccacagggaaacagaaaggggagagaagagatgggaattccctagaggggagagaaatccctgaccatgaacttctaagatggagactgccttgtaagaatttttaagattttagctcttgcttcacatgacagaacaaaaaaatgatgttttatttttattttttatttttttgagacagactctcattctgtcacacaggctggagtgcagtggggagatctcagctcactgcaagctctgcctcccgggttcaagagattctcttgcctcagcttcccaagtagctgggactgcaggcgcccgccaccaggcctggctaatttttgtatttttagtagagacggggtttcactgtgttagccaggatggcctccatctcctgaccttgtgatctgtcacctcagcctcccaaagtgctgggattacagccgtgagccaccacacccagccaaaaacggatttttaggactcaataataaaagtagctcctagaagagaaatcctaaggatctaaataaatcctgaatataagtttggagtcaccaaatacaaatctcagactaagcctcttatcctcctgagtgttgctcctaagggggctcttgctctttctgggcatggactaattacggggcattttctcctgcactcatagagccacttacaaagaagacaggaggaggaagggcgacttagatgcccatgtgctcccatttcacattgtgttcataatgcagtgtcaacaaacagtcattcctggttgaagtgagtatacattccattattctcaaaagccaaaaggtagaagcaactcaagtgtccatcaatggttgaatggataatcaaaatgtgatatgtatattacaatgaaatattaaaaaggaaggaaattctgacacatactacaacagggatgaaccctgaggatgtcatgccaagtgaaataaaccagtcacaaaaatacaaacattgtatgattccacttacatgagatatgtaaagtagtcagattcctagaaacagaaagtaaaatggcgattgcaaagggctggaggaaaggagggtgggaacctattgtttaatgggtacagatttcagtttgggaagatgagttctgtgaatggatggtggtgatgatagcccaacaacgtgaatgtactaatgtcactgtacacttagaaagattcagatggggctggtgcagtggctcatgcctgtaatcccaacagtttggaaggccaaggcgggcagatccacagggtcaggagttcaagaccagcctggccaacatggtgaaaccctgtctctactagaaatacaaaaattagccaggtgtggtggcaggcaccagtagtcccagctactcaggaggctgatgcaggagaatcacttgaacctgggaggcagaggtggcagtgtcattgcactccagcctgggtgacagagcgagactctgtctcaaaaaaaaaaaaaaagaaagattcagatggtaaattttatgtatattttaacacaatttttaaacttcttcaaaaatatgtatatcacacacccaggaaatctgttcctcatctcctgttgcaccacctttctcccatccccaacaggagggaaaaaaaccttctgggaccccttctcaaggtctctcccataaagggcagcctacggggtcttcctctgccattcctggggtcttggagcctggataagtggtaggcaagggtttggaagctgtagctgctagcgcataacctgctgatggcaacaccagtttcattcttgtcccccctctgccctgcccctggggagctgcaggagggttctcctgagtgtcctggctctcaacctgggagaagggggaaaagacaagcctttggttcccagccttggccccctcctttccacttctcacttccctgtgttcagttattctctgaagcatatttgaacactcttgggtacaaatgtgttctccgtggagtccattgaatagtttgtgcattggcctgatctagcaatcaatggacagtttaaccaattgcttcttttcctcagattttctcaggtaactccctagtgctatcccctagacaacactaaatctggagaaataaagctttgttaatgtttttggatagtttccaagctgcacagcttcatggatgaccaccagtaggcatcataaatgttcaattatgctgaaacaattatgaaagtgtgcctgggtgatccctgcatttgatagcatgtggatattttttaaggcccacaattaagaccagtgagaagcaatgctctaacacattcttctgtttcatctatttcctagacacgtgttctttatgaattcctgcaacctggaagtcaaaggtacgcagctcaaccgcatggccctctgtgtatccaactgccctgaagagcagcttgactccctggaagaggtccagttctttgcaaacaccagtggtaggcactaaggcctggtttgttcttttccccatgatggggtaagctgtggggacctagatgagatcatttaccctgactctgctttctctggaaagctggaagttttacttccttgtgggtgcctctttttgtgtggaaaaggccgtaagcattttctcttgagcttgttcaggttattttttttctatctggatttatctgaagccctagctattccgtgtatgctccctgccactgcagggaatggtcatccacagagagagagaggagacagcccacatttaagacccaaaggcggtgtcagaaggaaggcagagagctccatgcacgtgggcacatccggtcctagagatgtacgtgcaggctgcgcgtagaattgctgacaaattggtcttttcatgagatttttggggccaatagatacttccactgagcagtgggatgtcacaagttgtaccagaagcacttgtataactaaaataccttgtactgggtccactgtttagaattttatctgtctgagaaatggtttgccagatttttaaaaattatttgcaaagccaggtttaaactatcaagcttctacaagaaattgttttcaaatatgcttcagattattttaggaccaatcatataacttttagttttgaatttggggttttgaagagaaagtaaggaagagaggccctcactagacctcagattgtatgcctattacttttgtgtttctgtcacccatagaccttgtagttgattctttctcctttctggtttggtaacatggctgtggtttccttactgactcacctggaaagaaggtataatgtctgtgtgttctgcttccagggtccttcctgtgtgtttatagtttgaattccttcaactatacccacagtccaaaagcagactcactgtgtcccaggctaccagttcctccaaggtaaaagcttccatactttttccttaactctaaacaaaagttactgggtacttggtgtgcatctgttactcttctaggcattgtgggaaggagatatcagaagagcccctgcctgcagggagcttacagtctacggaggccagcgataaaaacatggagggactatttgcagtatgcctatggacagtggattagaaatcaggctaaataaggagaaaactcagcaagcaataaaaatacacgtagtcttcaaagaacactagagctagcaagaagtaacttatgaattattactaacggggtgattttataaattagtgtgtatttttttctactccaattatttattgcaaagtagaaatcatttactttggccgggcatggtggctcacacctgcaatcccagcattttgggagactgagccaggcggatcacgaggtcaggagatggagaccatcctggccaacgtggtgaatccccatctctaaatatacaaaaatatatactatttttttgtatactaaaaatatactaaaaatacaaaaattagccgggtgtggtggtgcatgcctgtagtcccagctacttgggaggccgaggcagaagaatcacttgaacccagaaggtggaggttgcagtgagccgagatcgcgacactgcactccagcctggtgacagagcgggaatctgtctcaaaaaaaaaaagaaaatcgtttacttttggctttttatcataattagactctgttagtttttattgctctagatatcttcataagaaacagaccagatggacaaggccaagtgatcaccacacctttcttaatgaaaacagaaagcacaggtccttatcaagagtacacttggtgggctccttgcaaggtcttattcacccctgtaaattagtgtactacctggcacatggtaggcaccttacaaatatttgtagaataaagttgtaatgatggaacggtggttgcattgccatggcgaatggctcatgtttacacctttgagaaggctaaggggaaaaatacaatgagtgtttattgccaccattatgatgctgagatgtactaaaggaaaacttgtattgattttgaattgtcattcttttgaaaaatgtgagtatgtttacaatgtaggagacctctctgaaaaatccctgagaaataatgattatttaattaaaacaaagcattattccaatcctctagggtggtgtttattgaactcttgtttgggacttacagtaagaaatttattacatcccaactcctgtatgcacataccttcatatgtccttacatatataaaacaaaactagaaatctcacaaaacaacatttacccttattacatatgattcacactcttagttactactctgttgcctttttaaaaataatgtatttcatagtcttataactggttgcaagtgaagcttgaaaaatgctgaactagcaggtgctcacaaacacaaagagacttgagaaggtttaaatcacatcggaggcagaaaatagccattttgtgatattcttttctaaaataaatactccatgttgtaagtaattgaaggaggagagaactatttgctgaggagaatacccatttcatttttctataatattcttttttttgagacagagtcttgctcttgtcacccaggctggagtgcagtggtgcgatctcagctcactgcaacctccatctcccaggttcaagcaattctcctgcctcagcctcccaagtagctgggaccacaggcgcatgccaccatacccagctaatgtttttatttttagtagagatggggtttctccatgttggccaggatggtcttgatctcgtgacctcgtgatccgcctgcctcggcctcccaaagtgctgggattacaggcatgatccaccacgcctggcctataataacttatttttaaaattctggtaattgtaaatgtgtttatgatattttacattctggtaaaatgtaaggtatcataaacacatcttaatgaaacatactgaacccaatttaaaaaaaaactagaatgttttagtaataggtggaaggaaaattctctagcacttggagaggaggacttttttaagaacacagtttgtaactgtagatgtaactacggatggaattgaaagagaatggaatttttaaggttgtaatttaaccagagttggataaactctcttcttactataaatgggatggcaaccataattccacaggaagcttatatcttgatacttatgatgataatggcaaacatttattgagcttttgatacttttctaaacccttaacataatttgggcctcagaaaacgtctatattgtaggtattgttttcatccctatcttacaactgagaaaactgatgcagagaggtttaagttcatacatccagcaaatggaaaagctggcattcaaacccaagcagcgtctatgtttgagtcaagacttgattttattttgactggtgagtggccttcctagactcacatcaagctgggagaaagagtctccgtatcctgtgtcataatagcaccatttcttctcactctcaagccagccctagtccttttcaccctaaatgcaaatgtttccaatactaacttttcaagtaaagacaaaacccttgactgagtggccttttttggacagaaagagagagagaaatagcctcaagggctccattcccttttcctgcacaagcaagtgtttgtttaaggtgaaaatgatcatatttatcatggaatagcagtgccaagactgaaaagctggaaaacatgagaagggtggctatagggccaaagaacattttctaaatacctctttttgactaaactgattgtttcttcctcgtctgtcggtcatgtgaggtataacgtacccttttcgagtaatggctaaatatcaaggaatttgtggacctaggtatgagcttttaagagcagtgaaaaagcactacagaagataacaagcaaatagatcttttttcactttggtgttcaacatggtaatgtattttgagtccctcatgtattcaaaatctaaaaggcgtggatattttccccccagtaaattctagttctactctcccacataggtgcctgtgcatgtcactgcatggtttgctcagctgaattccatatacctggtgatctaaatatacaggcagcttacccaatgacttcctgcaagtttgagtggctttgctaatgggaagaagaaaagcagaagtggtgaagaaacctcaggccatggcctaaagatgcatccctgtgagccgggcatagtggctcacatctgtaatcccagcactttggaagggcgaggcgggcagatcacctgaggtcaggaccagcttggccaacaatggtgaaagcccgtctctactaaaaatacaaaaattagctgggtgtgatggcaggcgcctgtaatcccagctacttggggaggctgaggcaggagaataacttgaacctgggaggtggaggttgcagtgagccaagaccacgccattgcactccagcctgggtgacaagagcaagactccatctaaaaaaaaagatgcatccctaccccagctaatgaaatactctaaatctcgaaaggcgtagcagttacatagatgtgtatgtttatcaaagtctctaattttatgtttaagatcagtgtatttcattgtatataaatattgcctcagtaaaaataagaggaattccttacattctgaagtgtattaagttaaaaaaaaaacaaataatagaacagtgtgcagtatacttttgcataaaaagtggaaaatgtaagtataaacctataaatatatatatctaggtatatatttgcttgtataaccattattacatcaagcatgacttacaggatgtagtcagaaagcaatttaatttttgtctttctctgtctctttaaatttattcagtgggactagttttttctgcccctgaataaaaacacaggcaattcccaaggcttctctggtaacttttaggtaatacatactgagtcactttaagttgcaacagacactttcaattcaataattaaaatgttcagcccagaccaggcacagtggctcatgcctgcaatcccaacattttgggaggccagggctgtaggattgcttgaggccaggagttcaagaccagcctggacaacataacgagaccatgtctctacaaaaatttaaaaattagattggcatagtggaacatgcctttagtcctagctgaagctgagatgggaggatctcttgagcccaggggtttgaggttgtagtgagctgtgatcatgccactgcactccagccttggtgacagagcaagaccctgtctcaactttttttttttaaattaaaaaatattcagcccaatgtgataaacttctcacttgatcggaggttcaaacttctgccccctgcacgcttggcccaggagcaagtgggaaggccatagtccaggaaggaggctgtagtcagcctcccttctcctctgtttattcctgccctcctctcccagcttgctgaaacaggttttgtctaaggggctggtgcagcaaaagtgaaggaagaaaatagtagcaggaacacatttacttgtctgatactagcaccagcattctctgggcttgggagatgtcccggccagctctttccctcatgggcatgttttgggttcttcggggctctttcagctgcagtgcctttcatgtagtctaatgcatctgtgctctggctggtcatgtgagaggctttcctcagtcctgaggcattaattagctacctcagagagcagccacctccagctccttctgccaaggtccccacagccttctacagggctgtcttagacacgatcggtggcaccccatcactgggacttgtgcacatgcagcccacaactagaccccaggaagccctctgcaccctttgccctgacaaatgccctgggggctcttaactccccagctgtagctctctgctctgctgttaaagccgctcaccctccagatttcttggggtggctcagaccttaagccaggggattccctaagctctctgagttttccatgaaacccttctcatctgacttaggaaaatggggatggagtcacatgacaagtctagtaaaaaaaaaaaatttcaactcttcaaaaattactcttctaatgattctctgcacttgtcatcacctgtgcagagtagattttactatatgcaaataaaaattaaaatcaagatgtcaggatcttaggatagtgtgtagagggtgacaaattaaatgactaataaggagctgatgtgagtaactttggaaaacagctttgtgactagatactgtaagctaaagacaaaaggaactgtatacaaacactgtactccagatagtacatttgtttgtcacatagctactggttaacaattgtttttctcattttttaaaaattccctaaacaatacagtataatggttagcaattctgaaattacatactagaatcgattatagggcctagaatcagtaataccccaccatacccaatacccagatcatggtttctaatcattggtcttcaagggttctttggagaaatggcaggttctaggacttggataaggaaaataccagctacgtctggtatcatcatcctgtagcatcagaaagtaaggaagtgctcaagaaagaaaaagaatgggtcttgtcaaaaggacacagatgactcgtagtggccaaagctggaatagattgaataacacaattaagattataacccaaagaaaagaataaatgttgatgaggccatactgatatgaataaataattgaataaataaataaatggggggaagggataaatcctttttttctttttttttgaaacagtcttgccctgttgcccaggctggagtgtagtggcacgatctcagctcactgcaacctgtgcctcccgggttcaagcaattctcctgcctcagcctcccgagtagctgggattacaggcacccaccacgacacctggctagtttttgtatttttaatagagatggggtttcaccacgttggccaggctggtctcaaactcctgacctcaagtgatccactcgcctcggcctcccaaagtgctaggattacaggcatgagccactgctcccggtgaaagggataaatctttacttcttcctccaagaggtggaatttccctccctttgagagtgggctaggcttagtgactcatttccaaggatagagagggaaaagagaaaaataacaactttacaaggagaaacccggcaggtaccaccttaactaggtgatcaaggtcaacttcaccagtgttgtcatgttcctcgataggattctatgagaaaggcacttcacctctgtggcactgtcccaaaaacctgttgactgtagcctaatcatgagaaaacatgagagaaattctacaaattaagggacattttacaaaatacctgactatgaatcttcagaaatgtcaaggtcacgagaaacatggaaaaactaagaaacttgtcacaggccaggcacagtggctcacacctgtaatcccaacactttgagaggcagaggtgggaggatggcttgagctcaggagttcaagaccagtttgggcaacatagcaagactctgtctctacaaaaaacataaactgtcatgaccaaagaggagacgtgacaataaaatgccatgtgctatcctgaattagatcctggaatagaaaaaggatgttacggtgaaatccaaataaaggctgtagtttagttagtagtttagtgacaatgttaaatcttaattttcacaaatatactgtggttatgtaagacatttacattaggggaatgtgagtgaaggatacacagaggaaccctccaccatcgttacaatttttttgtaactctaaaattattcagaaatttaaagtttacttttaaaaatgctctgcttatcaacttccaactcttttatgctctcagcatggatgtgggtttaagaataatctaaccacttttctcccacctcttttttggcatgccctgaatggtggagtctggcgtctcattttggagtagaatttttattatctttgagctcagccgcaaattccatttaaacttcctatgatatttacatatgctaataaaagtctctagaatggtttgcaagaaaccaaaaatcatgggtgcctgtgaggaaatgtacttcggtagctcaaggacaaggaaaggcaatttcttgctgtttggtctcttgtactttttggaatttaagccatgtgaatgtattaccccttcaaaaatgtaattacaaaaaacaccgtttgtgttactcttctcttgaaccactatccagtgactcaggaactgtttctgtaatattgagacttctggagaaagattcttccacgtgttctatgttgtgcttcattagaagcttgggaagtcatttcttttcttcagggcaatgaaatcttttaacatttggattctcctttgtttcattcttatacattgcacaaaatgattggtgattgggttttgagcagctttttagataatttgacacttctttggttgggattatttccaccatttggggttcatggaaagaaagaagaacaggaccctgtgaaggtatcagtggcctcatgaagattcattagaatgcatattgctaggcttttttacatttcaggaagaagctaaaaaaaggtcaactttctcatctacccaaggcagttatcaactgcagcatcaatcacacatttactatccatttattgagcacccactgttcatagcaaggctctcaagcctcatatgccttcctaaacaggacggaattaagctaatagtgtcattaacacagcttctgtctcatccagttcacatccctaatagttccttacagaaatacaattcttttgttggggttggtagtttgtgtctaagaagggctaagacaggagaataaaaattgtggttcccactgggcacagtggctcatgcctgtaatcccaatactttgagacatcaaggcaggtggatcgcttgagctcatgttgcccagcctgggcaacatggtgaaactctgtctctacaaaaaatgcaaaaattagctgggcgtggtggcacatgcctgtagtctcagctactcaggaggctgaggtgggagaatagcttgagccctggaggcagaggttgcagtggcccatgatcgagccactgtactccagcgtgggtgacaaaggcagaacctgtctcaacaaaaaaaaaaaaaaaaaaaaaaagaggttccccataaataaaatgtagtatatgtacacataccacagagtagtatttagccttaaaaaaagaagagatcctgctatttgcaacaacgtggatgaaccagaggatattatgttaagtgaaataaaccaggcatgtaagggcaaatcccatacatgatcccacttgtatgtggaatctaaaaaagtcaaattcatggaaacagagaatagaattgtggttatcagggatgcaggcaggggaaatgagagatgctggtcaaaggatacaagtttctgttacgtaggatgaataaattctagatatataaagtaaagcatggtgactatagttcataatactgtattgtatatttgaaatttgatacaacagatcttcagttttctcaaaatatgataactatgggaatttatggatacattcattagcttaactgtagcaatcatttcatgaagtttatatatatcaaaatatcacattgtataccttaaatatgtgcaatttttatttttaaaaatgttgctccccaagtttaggtttttggtttctgtgggttcccataatcaacttcctattcagaacatcagctaatcgatgtagcagagcatacttgcctggctttctaaggtgtgctctgcaaatggcatgctagacgcctctctattactgtagttcttaagcttttttggttattgagaatgttaaataaacatcttttaaagataaatgttaaataaacatttttgccatctttttttctctatttttagcaagtcatttcccttatttaaccgatgtgtccctcaaacacctgagtgctactccctatttgcatctgttttgataaatgatgttgacaccctccaccgaattctaagtggaatcatgtcgggaagagatacaatccttggcctgtgtatcctcgcattaggtaattctcagttaagttaattttaatagttgtttatggaatgccaaagttcctagcattttatatgttgtacaatgaaaattagcctcttgttttaaatataaaactctgtatttttaatagatattttcagtgtttcagatttaagtgggatgggggcaatacgaatagaggagcggctggccctctggcagaaagcctcagtgggtagggttgccttgatatactgactatgttctagtgtctgctcctcactggggatgggtatataaagcagattgccaatttgtggatgggacatgaaaaatacaactgtcagggtgaccagaaaccatgtcttctggccaaacatgcctccacctgtaggtggatcagaaagcagatcagaaagctgcttggtgagcagggcaaggacatgtatgcatccatgttaaatggagtcagactgcaagggcctgctgtatcctgctcctctaagggacatacctgctttgggttgtagacaggtcaaggccttcagccttctctgggcatttctggaagcagctacccactcttgatcttttgagttcccattttctatgtttcagttggctgaaatcaagagccaactttctctttgaacaggtgaatacactctgcccctttagacagtggtaagagcctattgtctcctcgctttccagtggcagcccacaaacctcttggtagagagaaactctttggtcagacattaacatatttctaacagttaacaaattgagttttccacaatttcattactaaaaggttcctaattcctgaatgcttggggatatttaactagtcactattatgactttcagacttcttacttaggctgaaaatgacttcaattgactcaaacaagatgctttgactcccaaatactggcttggttacaatatataacaaaaaaacctcaggttattcctgatatcttatataatgacctaatgtccctgcaaggacattgtcatgtgcttattagattcataatggtattaacagctgtcgtttactgagcacttaccatgtgccaggcattgtacttattcttcactcattaaaacctcatcagaatcccagtaccactcataggagatgaaactgaggcttagagaggtttaggacttggccagtgttgcacacctaggagaagaggtggcagaactaagactcaaacccagatctgtgtggtcccaaaacccaccttactaaacataactctgatctagatgcaatcctgatttcctatgtcgaaaatagtacatacagcttatttcatggttaggatcttaaattcttcattttaaagacattattaatctttcatatttaataagagtaccttagaacatgtaaagttagaactttacataagcccagtatgaagtcaaaagatttaagtatgataattttagatggttcatttggacttgtaagaaaaaaagatttgggcatttgagaataatattgctataaaattttttttctttctttctttttttttattgagacagagtcttgctctgttgcccaggctggagtacagtgccatgatcttggctcactgccaacctctgccacccgggttcaagcgattcttgtacctcagcctcccgagtagctgggattacaggtgcccgccaccatgcctggctaatttttgtatttttagtagagatggggttttgccaggttggccaggctgttctcgaactcctgacctcaggtgatccacccgcctcggcctcccaaagtgctgggattataggcgtgaggcaccatgcccggccaaattttttttatttttgagaagaatactaggactttcagagacaggcttaccacacttgattgaatggtgcatcagagactgccccacgtataccttgttatttttatttagtgtttagtagatatcccaagatatttagagattgaatacaatcctcagccgtcactgttctggagggttttgtcatcgcagtgctaccatcatctcccctatcctttgttgctattgaggtttatgtgttttgcttaatttttcagccttgtctttggccatgatgtttaccttcagattcatcaccacccttctggttcacattttcatttcattggttattttgggattgttgtgtaagtatttctctacttgactgatttcttttcgattaaatgaaaagcctttacattaagtacagaacttaaaagttggcatttttaagctacatggagtcttaaagagtatctagccctgtcactttacaaatgagaaaacttggcctcagggaggacgatgggagttgctatgtctcacagacagtgcaaagttaatgaccaatcttttttttcttctttcttttcttttctttttctttttccttttttttttttttttttttttttgaggcaggctctcactttgttgcccaggctggagtgcaatggcgcgaacgcagctcactatagcctcaacctcctgggctcaagcgatccccctgtctcagccccccaggtagctgggattacaggcacatgccactacacccagctaatttttgtattttttgtagagacggggttttgccatgttgcccaggctggtctccaactcctgagctcaagcgatccgcccaccttggcctcccaaagtgctgggattacaggcatgagtcaccacgtccagccatatctgtagtttcttctgctgtgctatgctgcccctgagatgagctttccaataccgtgatcctgtatccataacgttaaaagagaatcccagtacccactgggagcattttaaaggatttcttctgaatgcgcacctcacccattggcacgtgggtgcccacagttgtcatgtaaaggctctgaccagccggaagacacacaggcctgcatggaagcagagtcctggagaccctgtactgtgcccatatttccctcccggttgctggattgtggatctcaccagcagttgttgggaaagaggtccgagggacaagggcacgcaggaggctcaaggcagcagccatttaccaactggtgtggggtacaatcaggtgtcacttaatgacaggaagggatgtgttctgagaaatgcatcactcagcaatttcctcattgtgtgaacatcacagggtgcacttacacaaacctagatggtagagcctactacacacccaggcacatggtataacctattactcctaggctacgaacctgcacagcatgctactgtacagaatacggttggcagctgtaacagaatggtcagtatttgtgtatctaaacacatctaagcacagaaaagtacagtattattaatctcatgaaccaccatcatatatgcagtccattgttgatcaaaatgtcatcatgcagtggatgactatattttaatttttaaaaactgatgtgattgtcatgtttctttcccctgagtcatcagctctgccctcagcaacttagagccctgtagccctgtgtcggaggacaggcacaatgacttctgagggttgtttcttcctgtccactccaaccttcctatagttactgtggatatggcataaggtggtatttcgtacctaaatgtggagtacttgcaatgtcagggcatcttccaaatgagcttctgacttccatgattcccacaggccgtgtaaattttcctggttttgtgggtgagcagccaatatccaggctccacaggagttatcaccaccagagcttgcttaaaacatttagacagtgagctctggcattgtccctctcaccatcctgtccatggggttttcctcctgctcgcatccagacccaacctgtgggttaggtgcctgtgttctggggtcaccatcctgggtctcccaaaacaagcatcatcccagaacttgtgggtcctctatgggttgccctggctctgcccagcttctccagagggcagcagttgcttgtagggtccgggtatttgggacccactgccagagcagtgccacgcggccggtgggcagtggctggacttcctgtgtgattctgtgtgctggggaaaggttacctcatggcgtgtgccctgagctctgctactgttctcttttctagttgtctgcggtgttttatggtggctgtattatgactataccaacgacctcagcatagaattggacacagaaagggaaaatatgaagtgcgtgctggggtttgctatcgtatccacaggcatcacggtaagaaatgctcttctagcagtaggtcaggtagccagccaggactctgaaatccaaatcattgaattctagccaaaaacaactataatttgtttttcttttgatttagaatgtgccttctttggatttgagatacctgtatagggataattcaaaactcttcaaaaataagaaaaaaaggttttagttcttcccaagtcatttctgccacctcccagagactactgtgttatccttgctgttgcactgttctcagccccaaggggctacaaggtgggcatggtgggtgggcggaggcaggcttacggcagttcccattccctgtttgtgaggtgcggctcccctttgccagtgtatgctcagcttccgctgccctctagcacacagagccctttgtttccaaacccgctggccactgggttattttggtgttcagagaacttgctgcctcctcagtgaactctctagctgaaaacaggctgacttagaatattgagggagcaggtattagttactggtggtgggtggttggcaaccaaatgtcattcaggaccctctccaggggccgttaggaaggctcaaatcacaaggccctggggcggaccccacactggcttcaggtcccccagagtcgtcgttgctggtgtgttgcttactgactgttctgtggagcagctgcagccaggggtttccacaagcccattgaatcttgcagcaaatgcagattctcacaccaacaaaattctctcataggaaatccttctattctcatatttggtagttttcacattttctcctttccacggtgaggttttgggtttgtgatcttcacataaaatgtgccagggagtaagggtacaataaagtaaagcacctggttgctctcgcctcaggcagggaccagaccagacactcaacagagtctgcagaggaggctggagatgaaagggcttccccattccccaggctgggcataggggaagaggagcagggctgggggctggggagggtccagttcctccgtctaccctccacagggctccctttttgtttgtacactgcaccatttatgccacccagatttcagggccggggcaaggttagggagaggggaggccatgtgagcagggaggctgttttcacctgggtccatgagttctgcacaggggctactctataaggcagaattgagtcccagctcacctcccgttcatttgttgtgagttcttaccaattcccggttgctagatgagctagttcactcatcctcagaaaagcccagatggaagttcctcctcagcctttacaactgaagggtctcctctgggtgtcttgcggggcctctcctgacacctctccctgcatggtcaggaggctgtgctcccagatcctggagcagcttctgcagtttatccactgtcactgtctttcctccacttgactgttgacggcagaaacgctccagcaaagctggaagagaaagagcatctcaggccaagggcacagcatgcatgaggtcacatgggcaggggtgtgacttgcaggaagttcccttgatggaagcctgagatgcaggtgcagggagggtcatgtcacaaaggtcctgatctgcaatgatgataggtttgatctttctccagaggcactggggtgccgtagatggattttgagccgagaaacaccatctttgtgtttgcgctttacaaaggtccccttagctgtggagtggaggagggactgaggtggggcggggtggggggggtggtcagggaggttaaatgcagaaagctaatgaggttattggggtctagaagaaagaggctgagacttgagctgtggcatcagcggtggaaacagagaggaaaggaaggcatgagcggtattgaggaaactgaaccagaggtgattgagactgtactgggcactttgccagtccttgaccataagaatggccctgctctctaggagcctaatctaatgggaaattcagacgagaaaacatttatagaatatgttaaatagtacaatagggtaagtgtggaataaaatgggagcacacaagaggggaacctaacttactcttggaaagtctagaaaaattagggccactggaggtaaagaatacagggggaagaggaggttctagtatgaagataatgaatttgattcaggataaattgagtctgacatactgtaggacatccacggccttgtcaataactgatgtgcttattcttccagcacctagaggaaagtgaggctggaggtttttatttggaggttgtcagcatctaggaaggatgctgaaagcacagaggaataggagatacccccagaagatctcaagaagcagcaattaaagaagtaggagagctaaaagaaagatcatggaagccaagggaggaaaatgtttcgagaaaagaggagtggacaagggatctaatgctatgctgaagtcaagcaagacctggaatgtttccatggcatttaacattcaggaggtcacatgaagtgacttcagagagagctgtttcaaaagagtgttgggatctggatgtttgtgggtggttgaagaatgagttggggtatggaaatacagatgatgggtgtagacaagccaagaagctcggccatgaaaacagtaagagacggcagtggctggatggggatggaggggtgcagaatggtttgtttcattaatatgagatttgtaaatgtttatatgcagggagggaaagctagaagaaggcacagaaggtggctttgagtctttttgcctcatactcatattcccttgacttttgcaatatcttgggttctgtgggatgtggaggggaggatataagacagttccttgacattagaagaccttattctcattttatctttttcactgaccagactacaaggccctttatggagggactgtgtcttcttcgctattatgtctattaagatctattccagggaccagcacttactagatgctcagttagtgtttgcgaatgcatctgtaaaattataacaaagtagtgagtaactatcttaaaagagctgtttgctgagatgtcataataatagtagggcttgctttaagctctacccagttctccattatttggaagtaatttactcaaatccctttctcaccaggcagtgctgctcgtcttgatttttgttctcagaaagagaataaaattgacagttgagcttttccaaatcacaaataaagccatcagcagtgctcccttcctgctgttccagccactgtggacatttgccatcctcattttcttctgggtcctctgggtggctgtgctgctgagcctgggaactgcaggtaagggacagtgggtgtgggttccatcaccttggagtcatacacagaagaccattttggaaccactggcctgtttctgtaggcacctaacccctcattgagccagaggtgtctgatgacagcagcgttggtgcttggggctctgtcatggggaaaagtgggaagttcttttacctcttctatattggttttaaagaagctgggtttgtgtttcatgagagaataaattcagtaaggactgaaagctctaggaaaaactacaatatgaacaaaggccaacagcaagaatattaccagatgtctccaggtatgagttttatccaaggtaatttgccaacccctatcaaatcagtaggtgacaaagaagaacccaggaaagactctattaaaaatatattgtgcagccgggtgctatggctcatgcctgtaatcccagcactttggtaggccaaggcaggtagaccacgaggtcaggagtttgagaccagcctgaccaacatggtgaaaccccgtctgtactaaaaatacaaaaattagctgggcgtggtggcgtgcacctgtaatcccagctgctggggaggctgaggcaggataattgcttgaacctgggaggtggaggttgcagtgagccgagattgcgccactgcactccagcctgggtgacagagcaagactctgtctcaaaaaaaaaaaaaaaaaaagtgttatgcccagcagagccagtgtacatttaaagcaaactcatagttcacatgccttggtcctgaaaagacaagattctctcctccatccttttttcatatccacacagtggttcttcaccagggctatttctcagaatcagctttggtgctttattaaaatacagttatctgggtgccagcctcagagattgattcacgtggtttgcggtgggacctagtatatgttcttgtaaagctccgtaacagggcaagcatattctaaagcagcactattcagagtgcagtctgaagccagataaggagcttagctagaatggacgtcattccattgcttccttcattgagaaagttttgctatggaagaaactgtcagctgagaaacgatgtgcttagtgatgcagttgatctacattctggcacaagctttttatcttactaacaatgtgaggttagacagcttttctgtggaccacactttgagtggcactgtccagatcttttctaactcctctgtttgattttcttaaggcccaaattcagtacacatggatgcaagtacaaaagagtaagtggcttcctgatactgtcaccagactgataaggaccacagctgatgtcaaatcagcaaggctgatgcagttccttaatgttttctcaagtttatcttgtcccttactggctccagtcatataagtaagaacagctgccatgtaatagattcttagtaaactcagtccccttccttctcctctggagctaactgaggccacagtgccaagatcgtcagcaggctgcctggaaggcatggcccttggaggcctatgtttccaccttcagaggtgcataggggcagtcttctactaggggctccctggaagctcgctgaaggcctgcagtgaacttctgataattacccagggaggaacattggtcaaaagggtataatccatcagaatgaggtttgtctggaagtgaaagaaaactcaaaacaacagtggctaaagtaggatgtaaggtaatttctctgtcacacagatgaagtccacatggagaggatccatgccagcctagttctctagcgctcaaggactcaggcacccgctttcttcttctgcagcctctgcccttgcttccacctcatagtgaaaggctgctcaggctcccactgccatgtcttattccgaccttgaggagggtggcagggaggaaagcgagcatgcccctcccagaagtcacaggtggcgcttccacccacacctcatcagccaggtcccagttacatagcagtgcttatctgcaagggacaccaggaaatgtagtttcattttgggcaggcacgcaccaatcagaggttctataaccaagaaaagaggggagaatagatatcgtgagacaggtgaagtctcagcattggatggccttcctctagcgagcttgaagtgggctcagccctggtcagaagggagggcagtggccccggtgcatgaagggaaacaagcctttgttgaaaatgtcctagattctaatctctgtactggatgctttcttatgttctgtcccccaggcatcacagtccccgtgtgatgtgggtattgttatgttcaagttacaggcaggaaaattgagattctgaggaagtcatgtgccggaggtcatacagctgggaggcatgacgtgctgtgactctagagctttggaatggagcctgtgctctttccactaccttacacctcccttgcatctgggatccaaagctaggaaataaaaataggcctctttaggccgggtgcagtggctcacgcctgtaatcccagcactttgggaggccaaggcgggcggatcatgaggtcatgagatcgagaccatcctggctaacacggtgaaaccccgtctctactaaaaatacaaaaaacttagccgggcgtggtggcgggcgcctatagtcccagctactcgggaggctgaggcaggagaatagcatgaacccgggaggcggagggtgcagtgagctgagaccacaccactgcactccagcatgggccacagagtgagactctgtctcaaaaaaaaaaaaaaataggcctcttcaagtttgctcagaatgaagctgtatcagggaccacagcagttggctggtggatgtgggctgtgcccataatgtgtctggggctggaggttgacagctagagccagctggggatgaggtgtgatggaggtggtggcagtggccctgggcagcagcactgtagggcttgaaccctagcctctagagaatcatcagagaaacagtgaggtcttaggaaatatggctcaggaccagtgaaggaccctcctcttcccacctccttaggtgcagctggcccagccagggggccccttgttggctgtgaatctggataaggggaactgtgtctgtggctagaccccatgatgttttggagcagggatggttttaatttaattcagaagtatttggtgggcactgtggggatgaggcgctgagcacggcactagggagaggtagggaacaggattgaggtcgactctctgccctcagtacttatagtcaagcaggatggtccaacaatgaaacgtgtgatcgcagtgaagattgatggatgtgatgatcagagaaatctggggagctatgggaacaccagaacaaggccgtaacccatgctgtgagtcagggagggcttcttagagggcaggctggaaatcgccaggtcagaaaatacagaaagaggcaaagggggatgcagcagaagtcaaggcagcacaaggagaggacctggccacagaggtcaagggaagagcccaggccagtgaggtcagaaaggagcaagccccaaggctgacttgggcatgaactgccagcctgtgccccttaactgccagcctgtgcccctgactaggtctaggttgggcccagggcttagtagcctccactgcaagagagacctggaggttattcttcagggctgaaggtagcgtgtcattctgcagccacctctcaggatcacacagtgaagtgtgacgattcactgttagtgcaagcagcaaacagcgagaacagtagaggggccagaaaggaaactgggtgccccggacctatgggaggcatctatgagcaggtcgattttaggcttctcaggagagaaggtgctacgcagagccaccaccccccttccccaccccgctggggtcaggcatcatagaaaccaaatcacccgtcccctccttccacctgcctgtggccgacccaggtgcacagggtcccctttgttctcagaggccttttcaccagtgccagagagcctggctctgcggctgggcagatcagcagctgaatcactttttgatcttcagaagatgccccagctaacacttgagagggactctgagccgctttcacctcttatgaagaggcgccaggtgatcgggtggcgagcccgctgcacagtgcccgattgtctcattccacgtcccacaggcagcttcagcggggacagacacactcttcagttagcgcccagttttgtgtgtgggcgtcctcagtacataaatagttgtttgtttgtttttgtgttttgttttttgttggtttttgtttgtttgtttttcttgagacagggcctcaatctgttgctcagactcaagtgtagcatcaacctcccgggctcaagcgatcctcccacctcagcctccccagtagctggggctgcacatgccactatgcctagctaatttttgtatttttttgtagagacaggattttgccgtgttgcccaggttggtctagaaatcctgggctcaagcaatccacctgctttggcctcccaaggttttgggattataggcgtgagccacccaaatagttgtgtcagatggttgaatgaatactattttttactgcattaaaaaaaataggagtgaacttgggttgatcatttttgcccagatgtgctatttttctaatgactgttaatcattcttttgactagttgacaaattctgacttgtttggggattttttttcagcaggtcatatcaagcccccatcttgcaccacccaacaatgacatttagtagtccattgggatttgtctggtaccagcaataagacagtaattactaaaatccaataggaaaaagtgaaaactgtggtaaccttggtaatctggtaggttggaaagagctcagatgacctggtcacctccagtgttcattaaggtggtctggaagctccagagtctgtacaatagaagagaaccatattggattttggcagggagtggacttcccgcgaggtctgtgctgcagttagaagatttaatcacaggactgcacacagcatacaccgtgtacttgggatacacaaaggggtgagcttggaaaggaggcagcagggtcagacagagagttttccataggtttcccatcaaatgacctggaacccaggctggctctgcctctgcttcctttttgccatttttgcaatggaaaactgatgtaaggttgcctcacaaggatgttaggaggctgagatgagacaagagctttgctttgcaaataagggaccatatgtattttttatgttaggaattaatgttgaccaaggaacatctagtaccttcagctctgtagtttattctttgctttctctggcacattcaataacacaatttagaagaaaattgtcttttttttaagttttcagagatctagaagataattgaagttattttgcaaaagcctgctagtggcccagtcttgttctaggaaaagagtaaagggaggttgcacgggagagagttgaaacagctcctgcatttcagaagttcctggtccctttgggaaggtgcaaaggaaagcagtctccatgcacatccccatacctttgctcctgctgggatcttcctctagaatcccctcccctgcccaactctcaccccaactctccccctaaactgcttccccaaactagtcattcttcaagattggtttgagtattattattcttggaaaatctcctataaatttctcagccatacttagatatttctcctccatttttttccttgcatattttatattcttcattctttcaacaactatttatctcatgcctgccctgtcagccctggagtcacactacatgccctgggtacttgagatacagcagtgaacaagacagcagttctgctctccaggcctgacattctactgggtgggcatagaggcagtgaataaggaaatatgcatcccttagtgataaatgctatgaacaataaagcaagatgtattgtcatcccacaagaggaagaacacgtgagggccaggaccatgcctttttctttctgtgtctcttagctcagttccctacctgaatggattcagttaggggtgctgacccagggaataacatcacatcagtgtcatggttgtgaaatgagatggatacatgaagaactcatatattgcaggctgcctgtcaatgagattttcctctcttttttcctaatcctcatgctgccagagccgaagctgaagccagtgggagacacaggcaggatgaatgtcagcaggctggggctggcaggactcttgggccagtttgctggacaaggccaagtgcacagaatgtgctggaaagtagaacccctccaaattaggcctgcttcccttggggaattatcctgaccagctggactgccttccataaggaactgccatctataacaatcattatatcaccttagtcttttgaaatgctttaaagcttgctaataatatccagacttacagctaactgcactatgaatatctttcagattattttgatgctctcaaggaagatctctagaaaattgtctccaaatctctttaatagaatatattacttgaggaagatatatccattcattcattcaatcaacaaatatttattgaatatttactgtgtgtcagaccctattaaaaatgctggagatacagcttttcttccaatttggagggtagaaggagacaggctttaaataaagtaagtcagtcaatgttatagtactttaaaagttgataagtggcatggagaaaaattaagcagaaaggacaaataggaaatgcatgagggggcagggtgtcattttaaatttgacgatcaggggtgcctcactgagaaggtgatgatgcagaaagatttgaagtaggtgagtgcagagccataagaccatctaaagcaaggggaaacatcccaggcacagaggctggcaagaggctggagttctagggcacagcaagggaagcctattcagcgagagtggagtgggcgagggagagcttggttcagaggggagtcagggtgcacacagtcagatcctggggcctttctggcctttgtaggaactttggcttctaacctgaattgggaagaagtctttacaggattttaagcagaataaaatcttgacctgactacattttaatagcagtgattcagtaagaagaggatggtggcttggaataggtcataatgttggaagtggcatgacatattagattctgcatctattttgaaggtagagcaaattggattttctggttacatgaaagaaagaggagttggagaagactctgagggattttggcctgagcaactggaagataactttgccataaactgatatatggggcaagaatttgagtatagcattttaggggtagatcagaaattaatttttagttgctttaattgaaatgtcttttagaccaccagatggagatgtcaagtaggcagttagctatctgagtctgaagttagtggaggaggtcctggctgggattcacatttaggaacttgggaacatattaatagtatttaaaaccatgagattagaatgaatgtagatagagaagggaagaaatccaaggactgtgctttgaggcacttcaggatgcccgggagatgagggagaacaaacagagaagactgaaagggagtgaccagtgggtcgaaggagaaggggtggagtgtggggccctggaatgcaggtgaagggtttcacagagatgtgcgcggtccagtgtggcaagtgctgccgctaaaggaagaactgaggattgaccactgaataatcatgattggagtaggtgaagagaaagtgggaggaaaagaattggaaagagtaagtatagacaatcttgaggaatttcactgttaaaaggaacagaaatggagaggaagctggaagaggaaagagtccacagtagatttttcttaaagatgggagatagttgcgaatgattcaatagagagaaagattttgatgaagagggtgaaaattattgaagagttatgttcacacaggttagaaagaatgggatctggtgaagtgtggccataggatcatgggccatttattaatatcatgttctgggagaggactcagattatggacccgtgttgatagcaggttaggtgtgaggtggtcagcactagcagaggttttctgattgcatcagttttctcagtgaaacaggaggtaagatcatgggctgagagtgaggatgggaaggaagctcttgaaggttgaagggggaatttataaaacagttgggcagaagaaggggaaacaaatggaccaatatgggagcatgtaagtttctgatagtaactcagatggtatcctctctctgatttttttttttttttgcctcatttattgttccgcctaatagctgaggtccagcataataccagcatggagtagatgctcaataaatgtttaagttaatttcagaattggaattctatctacctatatctcatttatagctaaccctgtgtggcactcactgtagctgaccctattgcacttactattctaagagccttacctgtttattatacttaactcataacagctatgtgtattgcactaaaagccacaagacaggacgagatcaccaagggtgtgagaagtaggtattaccattctccgatttcaagtgatgaagcagatttcaaaaaaagtcccactatttgcaggaggttgcttaggggacagtgcagagatgtgactctcagcctgtgtgactctcaagcccaagccagtaatcactgtcccaagttcatcttgcctactctcttcttcaccatcagagagctgtggcccacattgtttgtcacacatttcaaagctgagcctggaaccaagccttctcacaattcagtgctcttcccaccaccatcccctgagatctgtcatatcttgggatctacccatagtctacctcccattaacacccattagctacccatgatagtagctgtagtgcccagtccatagagacaaagcaactgtcatgtgatgaggggatcttgcctgcattcacacagccatccaggagagggcagtcatgtgtgcctaagcacgtctaccccacccacaggctctgcaaccgcagactccgagctagatccaacctgtttcccggctttcgccctgaagccagagcgcccctgaacgtttgtctaaaccaatggttctcaagccccccgcgccccccggtgactttttgcccctgatatggcatttggcaatgtgtggacacatttttgggttgtcgtggctgtgggaggggagggagagcttcctggcatctgtgtagagaggcgaggcttgttgctaacaccctccagtgcgcaggacagccccagccccagccccagccccagcgaagatctggtccacaatgtcggtgagaaaccctgccctaaaggaaagtcctaaacagccccaggaacaaatagaagatggctttgataaggatgttcagaaacaatagtgatcactcaaaaataacttgcaggttctgcttctttggggagtgccaaatgccattctttgggggaatgccaaataatgtctaagcggatcttgactcatcacttcagctgctcccaccgctgactgtgccaggttgggaggtgtgcgtatatgtgcacttgacagcacagggcagctgagaggagagtctggcccccattagcgtccaggtcctgtaggacatacttacctttgtctgtctgaagaaatcatccttcctgttctgtggaaatgttctccgcccgcaaactattcgtgatattgtaaacctagttttgcaaaagcataatctgtcgctgatactgctgggccttgtaggaggagcaggtacttcttccctggctcagagcacttctcatattccagagtggttctcagagtccactgacctcatctacctaacaggcattctgtttgggaggggccacctcctctggaattgggaatgtttcctgaagcatgccctgaatcaccccatcttagaaaaccataggcatttatccatgccttacccaaaacagagattgcctccaagccaaagtgagcccagcattcataaaacattaacctctctataaatcaagctgctccactgtttcttacaatgtaattcttgttcagcagaacatagagcttgggaattaagatcagccttagtcagtggaatcagtttttgatctacagcacggatatcctcccctttccttcacacagaccctactgtgaatatctaaggactcctgaatgacgagcctaaagtcaatttatagctatggcaggaaatatgaaacaatctctaaatgttcttcaagctataggtttcaccaaagaccagagcatgcatcttcttcccagtagtagttgttttaaaatccatagtgggaaaagatctagaaatcatatgcagccacaaagctgggatttggatttaccagtgaatttaccagtggatttaccagcagagtaaatttggatttaccagtggatttaccagcagagctaattcaaggacttctttagaggagagaaaagaaagcagggtatagccacgtgaatggcaaaaagttgttacggtgaccttgctggcctcagttgaaagtagtactgtgctcctgaaatttaatgatagtaataaaccattatcacttatggcgcgatatgtctatgggttgggcactataccaagtactttccaagtactctcactccgtgctcaaaataccaccaggaaataggtattctagataaggaatctaaaactcctccaggtattccagataaggaatctaaaactccaggaagccaaataacttgtccagggttacccacaaaggggtaaagctgggatctgaacctgggaaggttaacactgaggcccagtagatattttaaatgtgctaagagagtttgctcttgaaatgaaatctgaaatagatccttttgagataacaaagacccttgtctcttttataaagtttaaatttttggtgaagtaggattctataatgtgatactaaaagctttgtgtggtttcatcaacgtgctgagtttggtttgcatcacaaagtcatatggtaggaaaactacggatttttagagtcccatgtgtttaggtttatattctccttctactaattttgagctctgagactttacaaaagttacttgcctcttcttcttcttctttttttttggagactggaatcttgctctgtcacccaggctggagtgcagtggcgtgatctcggctcactcctaccctcgcctcccaggttcaagagattctcctgtctcagccttccgaatagctggaactacaggtgcctgcgaccatgcttggctaatttttgtatttttagtagaggtggactttcaccatgttgatcaggctggtcttgaactcctgacctcaggtgatccgcccacctcagcctccaaaagtgctgggattacaggcatgagccaccacacccagcctacttgcctcttctaaacctcagttttcacatccacaaagtgggatgagtattatagcatatgtcaggtgtcttggaaattgcctaccaatggtcactgtaattatcaccgttggtgttatttagaagttaaatgtgtgtttttgattttgatttttgtatattttaaattatggtgggtacttgattttggcatttgttttatgtaatgccaaaggccaagcataaagaaacatggcttgttgaaccatggttcatgcttaggaaaacattggtgtaaagcatgtttgtgtttgaaactttaggagctgcccaggttatggaaggcggccaagtggaatataagcccctttcgggcattcggtacatgtggtcgtaccatttaattggcctcatctggactagtgaattcatccttgcgtgccagcaaatgactatagctggggcagtggttacttgttatttcaacaggtaggtccagtgttttttttctattggtttgtctatgtggtttatctatgtgcttcatgttaatatctcaaaagatatttgggaatgttgacctagccccttaaaagaagttggcaagaataaaagagtaagctaaaatttgggctgtattctcatttggtggtgagaagaaatattacaccctaaatctgtcacatttccaacctttttactttaagctagaaaatttagaaagaagacaaacagaaaagagatcatattgcttagacttgaaagataaaaaggggctgctctgcctatggagtagcctttttttttttttttttttttgagatggagtcttgctctgtcatccaggctggagtgcagtggcgcgatcttggctcactgcaagctccgcctcctgggttcgagcgattcttctgcctcagcctcccaagtagctgggactaaaggcatgcgccatcacactcggctgatttttgtatttttagtagagacagggtttcaccatgttggccaggatggtcttgatctcttgacctcgtgatatgcctgcctcggcctcccaaagtgctgggattacaggtgtgagccaccgcacctggctgccattcttttaatattaaaaaaaggaagggtggaactcccctatgaatatccatcctaattgacttcagacaaaaaaattactggtctattttgaatatacttcagtaaattctgtgagcctcagtttgtcctctgcaaaatcagataacatttgcttggggaaaaaaattaatcctaaaggaattgtatgtaattacaaaatataatttatattatagttaagaaccagtgaattagttacacacttctctgcttatatccctatcacatcatgaaagcaattgaggacacacacaaacacacacacccctgaacgctttacctcttctgtgtgtgtgactcaccccagggcagtgagagccctcaggacagaggaacccagccagggcaatggcaggactgggctcagaaagagaagtttactcttcatagggctgatcctcctccagcctctcagaccaaatgagagagaaacatgagcttcattgggagagactatctgccaggggtgattcctgccattgagcagtttcctcctgatgataaggagcactgtcgggtgtttgtttgtttgtttgtttgtttgtttgtttattgagacggagtcttgctctgtcgcccaggctggagtgcagcggcacgatcttggctcactgcaacctctgcttcctgggttcaagtgattctcctgcctcagtctcccgagtagctgggactacaggcgcccaccaccacgcctggctaatttttgtatttttagcagagctggggtttcaccatgttggccaggatggtctcgatctcttgaccttgtgatccacccgcctagtcctcccaaagtgctgggaattacaggatgagccacgacacccggccaccactgtgggtttttaatgtagtggtgcagttccggagcctccatcattagagactccagaggactcacagaggggctgttgcccttggcattgagaacctccaagcagccgggggtgggttgtgtgtattgcttcctcccaggtaggggagcaaagagagtattctaaccaaatttgccagcaggtaatatttgcctgacagtaattttgtgttatcttagaataacaaaatcaaagcattttcaatgaggacttctaatttggacttccagtgaagcatatgcatttatctcctaatctcttccctttctccagccactcaaaaaatcatgaaagattgaaacaggcacaaacacaccaggacagtaagaaacagagaggcaatgacagcagataagaaacaccaaccaaatggtgagagccaaagagagggaggtggagcagtgccctaagcccgctggagaaagcagaagcagcctgtccgtgtgtgttggctgcatgaggaggacaaataagatgcagcctgaagtgagccacagaatcccagagaggctcaggaattcaagtataaaaagtatttccaaagattagctgaaagccttcctcaggagtagttagacccccaaattccacaccagctgaagacaggaaaatttgttctccagagagggaaagcagagagggcctggacttggggtatcaggtacagctgaggctgggggcaagtctctgtactgaaagcagggggagtaagtgaaagcctaaacactgaaatgaggtcccccacatacaccagcaccccacattccacagttcagctcccagaatgttggcagctcatttgatattccctaggaagaggttagaggatgcttttgtggagaaactgcctaacccaaagtaaagacctacagatagtgccatatggggtcccccaatgaaatggattccctgactcctagcaaaacagtgaagctcatcagacaacaagcaacatgcctcacacagagcttccaggtcattctggagagcctcactcttcaatttgaactgtttaccagtgattattaaacatgatgaatgcctctaagtgaaagaagagatcaaaatgaacaaataaaatgagcttagggaaaacggagacaatgcaggctgcaaaaggaaacaacaaagcaaactataatattatcagagagaacaaagatgtattgctaggatcccctcccaccaacaaaagaagggcatagtgagaaaacaagactcttgagtaattaaaagtatgattacaaaagtgaacattttctattgaaggattaaaatataaagtggaagcactctttcagaaggtagaataaaaagacaaagagacacaaaataagagagaaaggattaaaagaggataaatttgggagacccactatctgattaatatgagcccagaaatacagaacaaagaaaagaagaaagagaggaaattaacaaagaaaatttgccagggctggaggacacaagtaaaaagaagattccagaagcttcccgagggaaaaaagatcacaggcaaaggatcaaggacccagaataggatctgactttcaccagcaactctgaaccagaaaaacagtgaaggaaggctgtagaagtctagtgaaagattatttccaacctagaattgtatagccagtctatacctagtatagagttgtatacctattcttactaccagtcaagggtaaagaagaacaaagtcatgcacaggcagtcccaagatttccctgccctcatcctttctagcagggatgttccccactgaaactcatgtgtaagccagagaggaaaacatgagtttcagaaaacaggcttgagcagagcagagcaaggaattcccaggagggtagctgcgcagcaggcgtggaaagcgtccagtccaaggtagacaatgggctccaggagagatgtcaccatgaaaagaaaatggaactgagggaataccaggtgtgttcgaacacgttaagaaaagcattacacgttggtgaagcgttcggtgaggcccatggaaatccaagctaataaaaaaatgtgaaacaattaacttcagaaaaaaaaagttgtacaggaagggaatctaattggaatatgctacttagatcagttgtgaatattatttacagcacatattatttatgtatgaataacaaacactaagcattaactaaaagctttgatgtaattacattggaagaatgggaacatgagtgtgaggagattgggggagttaggctatgtaagaaaataaaaccagaatctttcatagtagaaaagtcagtagacaatatctgaagccaaaaaaccaagaaatagcagtaagaacatgtaattttgaggtgtggaagtgagttctctaataacaactaaaatattatctcagggagagagaattatgaatgggggaagaaaactgctgtttttcctattaagcctagcagtgatttttggctttgtaagacactttacatattactttgattaaaaaaaattaatttataatataacacacaatgatttatttttagcacaactattgcatttattaaagagctctgcttcctttttgattttctgcctaattttgaaacctcaagatttttcctaatcttcaaagttcacaattcttcgtatccttttctggcctgcactcagggtgaggattaaatatagccagggtgcattcatctttgtcattcatttatgcactacgagggctgaagagttcatacaaataccatcaggtaccaggatatgggcaatctgtagaatttactttttacaaccatttgcttgaagaaggatcaactgagagccataaaggtggtgttagggatgtgataggaaggagctagaacccttcagggtggtggagggacacttgaggtgtgacttcatcatcattttcaaatatacaaaagagggtttccagctgctctatatctacagatggagaagaggaaatggattcatagcagagcctaaggaatttaggtagagatagatgaatttcctaacctagcaagagttacccaggccagctaaagaatcctcttctttctaataaagacgattttcattttctgtagaataggaaagaaacatacaaccttctcagccctccaaaccccatcttgcagtgattttgttgtaagaaatactggaagagacatggtctctacagggaccacacagtcctttgctgggaccagctttacgttggaggccatttgtcccatgcagcccacacctagtccaggagcctcagcacaaaattaattctccataatgtcagaagagtttttagtgagcacgaggctggatctaactagagccaaagcttgtctctaggaccatgatgcggcttgcctggctgtatgcactctgttgtctgatgggagtagaaattacaaaacagtactttgtaccatgacccaaaggtgttagaggacttggatggatgggaccattaaaccctttgccccacagcttggattgatgtggtattttgggcaactggcttcgttgttctgggagccaggcaccattagcactcaaagcagccacacatccaaaggaagggggaagctgggcttcatggggcatatgctagagtcgccttaccctctaacactgcccgtgtcttccttattgccactacccacagaattggggtggatgtggtccagtgggaagatctagagagagatgaggaaggctgactgggggcccagtcctccccagcctcctaatacactcatcgctgggttgccccatatgctcaacactggaatgttgtcccccaggtcaattcttaaaatatgaataagtccagaggtaagtattatatttagcatcactgggtgtgtcagatcctcttcctgaaggcaggtttggctggttgtgagggagacagagctggaggcactagccccacacacagcaggggagaggtggtaggatgacgttacctttgaacatggaaatgagtctgagactaggtgggggcctcagagacacaccacttcattagccttttttttctgtagggctgtttctagttttgagggcaggtattgagtgactcctggctccaagagctggcttgggttgaaagggccctctttttaagttccgtctcccatcacgtgataacccagcttctggaacctctgcatcttcttccagccaagccaggcagagcctccagccataaccaggatgtgttacagactagggaagctgaggcagtgcaggtactcctctgcctgaagtggttaaccccatcacagtgaaacctcagaaagctgatgcctaaccccaaactctaatacctggagggctaaccccaaggccctcattcacagaggcctatgaatcatgtgtttccctaccagatggaaagcaggtgttgtcctcttctccctgcctcccctcttgagcaccataataagttctaaggcacacaaatctcctcaatggaaaagtaaacattcttccttaaaaaaaaagaaaaatgagggaagggaaaaaaaagtgtgtcagattttcctggcctacactactcttctagtttatcagatctaaatgaattcctattagcaatagcttccgtggtttttcctactttaaataacactgtgttgaaacacacatcctttttttttgtgggacaactgggttgcagtttttcagctcccaatattactttcatgttctctttttcttcctggctgatttgagtaacagcaaaatgcagccattgccaactcttgaaacatttctggctgccttccttttcctctctcaaaacctaggctgctgtcaaaaccttaattcatagtgacttattagcaaccagagcaagttgtagaataatccattataaagaaaccaagcttcacttggaatctgtgaagttgcttctcagaaagaccttattttctagaactggcttcagcgggaattcaaagggtcacccgtggggtggcatcagcccccactcctttgttttatctttcagggttaggggagagtgatggctgtgcccattctgttctttctcacttttttttccctgcctgtgaaactgacttgtacacattcttgggagctgcgtcatgacaagtcccgtaaatgattcacactgaagtgacctttaaagagcagagtagaaaccagcaggatttggggagcctagagctgtgtaggagccaagcacccagggctctctgtccctttcctgtaagtgggagctcactattacctctctggccactgatcctggtcatgtgatttggtgatgatttttaatcaccaggtgaatgctggcaatatttatgtatactcctgtgtaagttaaaccttggagattgtgccgcaattaaaattctgaaagtgaaaatgagatgaataggcaccctaaagggttggtggatgggctctgcattatgaagagggaaacttttttaactcatcaatttttttaaattttttctgttttatttgtagcattaagtggcaccaaaacgaattaaattaatacaagaaacaatttaaccgaagctaccaaggagtataaaaagttcgccaaatgcttattatgtcacaactttctaagttgttagtaccacagatgattggaaccagagagcttttgctgctttataaaaagtgtttttaaaatgctatccttttccctatttccagaagtaaaaatgatcctcctgatcatcccatcctttcgtctctctccattctcttcttctaccatcaaggaaccgttgtgaaagggtcatttttaatctctgtggtgaggattccgagaatcattgtcatgtacatgcaaaacgcactgaaagaacaggtaaggctacctcctgatacacagcacgttctgtgtttgggttgccagaaacttaattactggaaaactacagcaggtcccaggacagaaatgtgacctgtgacagcgggccgtgcagaaagctcctgcactcctcagctcccatcccccgcctctcccagcaaaacttttattttcccagagtctgtgttttgtttatggttttgtttattgggttttctccaactcggtggagatggcgtggggagggagtagttctgagttagctgattttccttcttatgtaaatgccaaacagacgggatgaactcttaaggtgaaatttaaacaagtttttttgtgaacatttatcatgcctttttaagtaaaaaaatataccataagataggaataatatttgttcatttctgttttgatgctaaaatattgcctgccttttgtgtttcctagagacagtcatgggaaattcctggtgtgtgtgaggaagaacgagggagaaaaggagagggtttgaatgagagtgtgtatgtgtgtgtacatgcgtgtgtacacatgcgcttgagagtgagaaatgggcaagctgacctacatctcagctcaaaggacagagaactgtagggcttttgtgcctgggggatttctcctcctagtttttatttccatgcacatttggttatgaatgccagtggaaaccagaacaccaggaaaacagctgttctcatggtatttctggcctgccaaacaagagaagattggacttttcccaagtcttctgttctcacacaatgttaatctcttcccccgtcaccaccttagagttggtgacttggtcagtttcacaaacttacctgattccaaccttttgagtatagctatgtgtccttagtaaattcaggacattttaccaataggtttacattgtattttggaattgttttcatttactttttaaaaagatatctgaattgttgatattttaaaatctataaccaagatttaaagttagtttatcaattagaagcaattgattggataacacataaaattatctggcttccttatctggaaatgcatgctaagcagttgcccctgattgtagaatattttcttgtatttctattaatattttgcttggccacattttgatgacttgaagaggcatttccatatccagggcaaaactagctacttttggctcctgcattttgaaatcaatccttcagtcttaggaaacttgcaggatttcttgaagaacaggacagcgttttattttaaatctatttgtgatatgtgtgtgtgcgcattggtaatagataatcataaattaatgagcagccgggagcttgctctccctcctaaagctaggcattttaaactctctggggaaacggcctttcataaatctaaaagagaaggcccaaggacctcagtggaaggcccaaggtctctctgactgaggtctaaaaggttatttatcacttcccagatcccacaaggaccaagggccaaaattgcttttagtgatgtcactattgggaaaatgtgtcctttcttaggttaaaaaaaaatttcttcctcagcagccttactgccccacactgtgtctacaatttaaatgtctcacacagccactgtgtgattttccctagttaaataggctcattcaccaacacagccaggctgaaaagtgtccagatcaagtttcatccaattgaattcacattgggatgagaaaatgtccatataaggctgagttattcctggggtcctcatcctaggctatttcaggattgttttcagggatgtgttcactctggagagtgggtaggatgcctccgagcacccttcccccaagaggttcattaaagtattcattcttaagctatgcacaagttcaagttatatttcaaaggagtaatttatccctcgaaatttagtcctgaaaaaaatctcactacaggatttatttcctccagagttaaacttgattctttatttatgtgggcacataactagtacctacagtgtattatttgttttttttgtttctgggatgtggatttttcgtgaatataaactttggtttgaaaaagcaaagtgtaccatttcagacacttaagggcagatgaagggggaagagaggtttttttttttactggaaccagaaggcctgcttttgttttgctgttcagtatggactaacctccctaatagcacccctaacacgtaagtccacaagacagaaatgttgctcctcagtaatactagaaccataattagtagtagtagtatgcacacaatagaacttctcccacgccaccagtgtttccccaggtgcataagtaaaaactgtgtttcctcagaaactgcctgcttttcttctttcctgtgttgtttttgactctgttcctttgttctcaacctgatccagcagcatggtgcattgtccaggtacctgttccgatgctgctactgctgtttctggtgtcttgacaaatacctgctccatctcaaccaggtacgtctctacctcttgcctcaggaacacacagaagggtccaaaggtgggcttcatctcttaggtcaaggtttggcaaattcttctctaagggtctaaattgtgtaaacattttaggctttcagaccagtctctctgtcacaaccactcaattctgccatcatggcaggaaagcagccataggtaaaatgtcaatgggatggatgtggctatgttctaataaaccttaacttatcaacactgaaatttgaatttcatatgatttttacatgtcaagaaattttctttttttgattttgattttttctcaaccattgtaaaattgtaaaaattgttcttagctcctgccagagaaaagtgggcggtgtgatggagctagctcctgggctgtagtttgcataccctaccctagaaccataggcctttaaagccatgcttcaaattctaaaagaaagtttttctcttttcagaaataaagagggaagggagtatttagaaaccctaagcataatgaatatatatcaactaagagctaattttcagtgtcttctctaagaactataattttcctgaactaggaaaagaattgcctccctaattttcatagatttcaccagtctttccttttcaagctgtaaatatgcctttaaaattataaaaattatatcttgcaattgtttggatttcagatttttttcctttcctgaatttttcaaattgatggaaatttaaatatgttgtatttctctatagagcatttaggagattttaatagtccttagtcaaatttacacaaagcagtatttttgtaagttagcaaactgttttataatttaaatgttcacagaaatctcacttagaaaagtatttcttataattgccccctcccaaagaaatgtacctttagaagtaaagggactaattagaccacctatgtttaatgtcttttaaggggtatttagaatacttttcattattcagggaaaaatgtagccttcttatagtaaggtctatttttaggctcttaaacttggagaacattttagagtatatttagttttcatttggattgctataagccagcatgtataaaacacaatcaaataccataggacctttcagaatgggggggaacatataacaagtcagtccaaaccgtttgaatacatttgtcgtggtgtaagatgttatagctattgtgtatatatccagacggcaacttcataaatattttgagatgcattgcaaaaatgtattaactatgataaaatatatatgcatgaaaaataaagtctaagaaacatatagatagactagaaagacaaaagcaatgaatgggaccattgatatacaaatatgttggccatatggccctacaaggcccgagggttgacctgttatcccctctcactgtactacgggaattcaggtactttccgcatccctctttcactcatggttttcatactggcccctggaagcctagaggctcctgtggacactgtggggaccaccacattaggagggcagagaaatggctgaggtggaggaagggtgggccctggccccatataccatgcctatactgcctggccttgcggcctgagcagctccactttatgtggtttaggggtgggagtgtgggagtgtactgaaggtttcatttgaggacaggtctctgctgctgaaacacatttgaaaacctctggtcccattttcacatttgtttcctctgccctgttatcctgagatacgtattttcctgccttctgaactttcaccaccttaattaatccaggaccatttcccttggtaattcaaaatgtttccaaactcataagtgacattaatgttaaccacaccttaatgaccattgtgaaggtgacgactccttttaaaagctgtgtcaatggaagtaatgatccctgattcacaaaaaaactaagccagccttgatccagctcctgtagtgagtcagtggtgcaaacagggataggtctttcagattctaatcatggtgcctgtgcactaggctgtggctaaacctgctttgtagtgtcttttccttggggtgactcctgtagaactgggtgttgccagctgatatgggtgatgctcagaggcctaaggttcaggagattgggaagaggaggaagaatgaaaaaacaagaattgatgtgaatattaatggagagggaagggtcacctctggtctacattgactactggaaagcagagtgaaataaaaatgtttaagaataaagatgattgtaaatggtgatcagagcaactgtcagcctcatttggcagtagacaaaggaaagtgagcataaagtgagaaaaggaatttagattcaccttttcagaaatttccttgcattggaatgacttactaggggacattgtggcatctctgtctctggaaatcagatttaaaaaggctgaaccctattttatgttcctcattttgtggaataggagctggaaaatactaaaagagaatgagatccatttgttaccatcaaaactcagatgctcatctttatttaacatcaaggagatggttgtgttttcccactgcttcttaaaagcctaatccatcttcactaaatcctagtagggaggcaggtggcagttgctgcattttgtgaacacccagcctaaggctgcacaggcattcacttgcaaggtggggaatgaaactctcagtctcataatttctcatttacttttctccctacatcataaatactgagtgtgtgcatactgaaaaaattacatgttcacctcacacatgcgttcatccagcaaccatgtgtttatgctgtatgcagactatttctacctgggcataatagggaccaggaccatggtgatacagaggtgatacagagtcattactgtatagtgcaaaaggcaagcctccaagaaattgacaagctagttgttgggagccaggggccagtaagtggtatatgcatgagacatttatatgacagtacagaaaagtacatgtttaagtgttgggatagggctgtggaagttcagaaaaggggaatcttggtcactgggagaggtcatttgactctgtaattaggggaaatttcctaggagaggtggacctgagtatagagcacccactggagatcaccagctactaacgacagcaataacagctgtgggtattggcaataaactattttgccagttgtatgctgagcacttttcctgcattatatcagttgttaggttttttgttttcgtttttgttttcttttgtttgagacggagttttgctcctgttgcccaggctggagtgcagtggcacaatctcagctcactgcaacctctgcctcccgggttcaagtgattctcctgccttatcctccggagtagctgggactacaggcacatgccaccacatgctaagtttttgtgtttttagtagaaacggcatttcaccatgttggccaggctggtcttgaactcctgacctcaggtgatttacccgccttggcctcccaaactgcagagatcacaggcatgagccaccattcgtggccagttgttagtttttgagatagtgtctccagtttacagatagggagattgaggcttagaggaggcacatagtggcagaactaggatttgaatccaagtctgttttccctccaggacccaagcccttaaccactgtgcatttttaaaatagccagaggaggactcatgaccaccacctggggatgtgagcaaagccagagtccagacaagtagagctggcagagcacatcttgttacacagcagacttttgtggaggaggacgggaaaggtgaaggagcaatgaagatgatgaactcactgtaactgtaatcaagcagttatccatccagaaaaggctggtcagggtggcctggcccctcctcctttcctcaggcaagttagtggtcaaagcgtctgggagtgttggctggctattctcagagactttcaggcaaagggaccttacagcctcccctctccctcccagcactttccaggggcctggctaagaaccccactgtgagactacaggctaagcactcagcaagaatggtgtacttactgtttcttaccaggtctgcacacagttcctcatggaaatgtctccctaagtgcacatctcttgtccattgtggacacaggcctctgtcccagccatgatgttggctttaggtcaatgttcctctaagtatgaaacccactggtgagccccaggactcttcctgatggttccaaactgatctgaacattctagaaaatccttttttcaatttttataggcaaatagcaggattccataggtttttcatttttgcatacaacaaggagctgtttgccaatcaataaagtaaagcgtgtgttattaaagcttactaaaatgtgttctttataaatccaaattggtgtcttaacatagtttcttaaggactcaaactcattactcttttcagacatctaactgccgaggcaatgcctggtgaccctgcaaaatttatgaatgcacacacgtagacagttgggatttgcaaactgggaaaagaacactttgctaccaccagtgttgccttgagttgactgtgttgtttggttgcagtcattcttgtcttgatgttttacttctgttgagtattccatttatttttttattttttattttttttgagacagagtttcactcttgttgcccaggctggagtgcaatggcacgatctcggctcactacaccctccgcctcccaggtttaagtgattctcctgcctcagcctcccgagtagctgggattacaggcttgtcccaccacacctggctgattttgtatttttagtagggatggggtttctccatgttggctggtctcgaactcctgacctcaggtgatccacccacctcagcctcccaaagtgctggaattacaggtgtgagccaccgtgcccggccttttgtttattcattctttttttttttaaatcactttaagcattgcattcctcttcaatgctttgttcttcttccagcagaagtgggaatgggtataggcaatgagctgtgggctagtgtcagaagtctgagaaccaccatatctataccagtctcctgggagaagcttccaggtaaaaatgacttcagtcaggtatagcagcagtttgcctctgcctcttcattatttgagtaacttgggtgagtcccttaaacttgctgagcttctgcaatatgaaagggttagattcagtgacccccaaggttcttatgtggctttttgacccttgtcatggcatccagcccagagctgggggcatgcacagtgctgccccacagcatcaaagccatgagatgctttgtgtgggaaatggggggagagtggaaaacaatatgagctgtttgttttcctgtggtgttccaaaatgacaggctcatttctcttcatgatataccttgtatccatggtgaggacttatcctagaaccacaaaaatcagtgatgtttcatgttgcctcaattctgaggcactggaatcttgtagagttgtctgagaatgtgaatgaacaaagaggagccatttatctgtatctacttacagcgatcctgccagtagttctgctataacatatagtgataaataaaataactggtgatgagatactggtcaaatgccaggcagctcggtcattctcaacagtaggagtgtactgtaatgtccaatgcctttcacagcccttttctgccttgggctatcatgcaagatagctgcgagcctgatggatctgtgctgcatccccttgaggagggaaccaagtgaccccgatgcaccttgatgcagtgtgtaaagcgtgcagcttactttcctttgtcatccctctagataagatctagtaagtacatgtacagattgttgcctcttgctatttgatcagaaatgccagcagcttcctgtctttctgactgatgaatatactggtcagaaaggtcccagataatcttgtgaaggtcaaggcagagaaaaacctgctgcttctggggaaatatacacctctctccccttcttacctcatagtgcctctccccaacctgctctgcctgccaagactgtttttagtgaacataatgttggtctctgtcttctaagcctttgcggcagactcaactttgtagtatctccaaacattctcttcccccgcccctttccttgcagttagctctgtttcaatgactgtctttctcgtagtccatcaatagctaaagcactcaatgacttttccacatcaggtttggttggttcatcccaagccagttggcagatctccagtgactcctcctttctgctctcccagagcagcatgtgcatctcagaaaaaaagtaaaaatattgtacagtttatctcactagattaggaaaatgatgtaaagtttcttaagaagaaacagttctttcagaagctggcattgccataataggtagtctcatcacgtagcatccagacagccattctttcagtgacagcggtggttctgaatcctccacccctgctgactggtttagagctattctgggcagccagctgatgttgagagctctggagagatgcctcgtgtgtgcgtgcttcagaaagaagctcacatgtgtgtcaatatgatagtttgcattaaggcccatttatagacaatggtaatccccacacccagctgttgtgtggcaaatgctactaccctggctttagatagaaaggaattaagacacctatttttcagaggccccaggctgtctgggagaaaacaaactgaatcctcatgtttcctggtgcatggttcagaagctgccaggcatatggctgtggcttagtgtggctttcctgggagcagcctctctggagcctagctcccacctgctgtgggcatgttacaagactcagggctcaggagggtgaggcccaaagccctcttctccaagtgggccttagtgctcagtcctttggggtaaggcccagtgagcagccgccatgttaaattggactctgaagtgcttcctgacatgaaatttcagtgccttctcagagagggaagtaatgtttgttgaatgaattattgcatgagaaagggagggaaagttatataagggcactcaggcagctaggaactcctgcgaggcaattgagtggtcagtgcaaatgacttcgacttcctcctaagtgtgcggctcccgaagacaagaataccagccactcactggcacttactatgtaccgggtactgtgctactttatgtgtatcaactacctatagcctcacaaagtagcctgtgtagtattttttaaacagatgataatactttggttcagagagcttaagtagtaacctgacctaggttagacaggaggaaagtagcagagctgactcttgaagttttgaagacccagtaagtcatttcctcttccttgtccaagttctgaataattgtgagatgtaagagtcaaacagatgaagattaaaaatatcaccttgaatatgaaatcatctgattggaaaactaccacaggaacagctgtaggcaagtcggcttgtcaatgttttacccctgaatcagaatgaccaacccaccttttaccaggcccagccaacaaggtgaacctctctatggatctgagaaaggatgttcctggtgacaggtggatcgcaaaagagaatgaggaagggcctgagcccgcctacactctgctgctccctccaaatttgcccagtcccttaagttcacctccttccctgaaacaaatgagaggcattagcctaaaggaagtccctgaccacagaaacccaaagccagggaaatcaagactagcgccacaatgggatttagagccaggttttcaccagtccactagggcactccttccacagggtagggactcagaagcccagaactttagagatcatgaaacagcctcccctcataatagcggaatctggggtccagagggtttgaatgcctcacccaggttacatggtgggcagagctcattctgattccattccctatcctgcatcttctcttccttgccccttctgagcctcctggaggacagacaggtgtgtcactttacacagtatgtctacatgagctgccctggggtaccttttggcagaaatctatgtaaatctcccccatatcttgggcaatatggaagacaggcccatgctcatggaggcagaagggtgaggaacatttgcatcctgggaagtttggggtctcaccttttattaatggtagcaagggcaactgggactgtttccaacaacactagttgaaaaggtcagctaatccaaggagttgccatttgtgtaaatctgagccttctttcataagtctgaactccatgtagaacatgaagcaaaccctttatgttctttgtgccttcctgtcatgacatgttctaggtacactggaaatatgctgagggagactgcccaggtttttaactttaagaaatccacctttgaatcagcacatccagtttcctcataaagaaggaagcaggtgacatgtgaaaacactgtgttctgatgagcagtgttcagatgtggggatctggcagctgaaactgactcctcctatgccctcccacccacaggttattgtgtgcagtggacaccacgctgcctgggctaggccgggccgggccgtcatctgtgatcacagctaggcaagggctagagtggggaggtgcctcagagtggaaaagggaactttccagtctaagttgttaacattactcccagtgctcaagaaatgtgaagaagatagattagcttcaacgtttcccaaattcacttagtgtggaaaataaaatgaaaccattaaatagctcctacaccaaatgtcctcttcccttaggatagagagcaggattctttggggcattgctctttgtctggaacagttgttgtccaaggggtctgactgcccaccttgaagtccatgctcttgtaagcaaggcagtgactgtaggcacgttcctcggctgtcattcttatttgtcctacggcattaagacttgttgagagaaggaagtgatgactggccagagactagagaatgcattcataaaaagaaaaaagcatatgaaaggagatgtgagtcactgtggctgaaggaatacatgccactttgatttagcagtcactaagtcatgtcctgctacaagcaggactcccatgacaccccaggccaccaccacctgagtctcatctttgaatgacttctacatgctatgaagagcagctgcagattcagatgtgcagatgatactgtatcatgtctctcaacctgatttctaactttgagttctcatgccactggacgggtggaaaacttaatttgttattcttgagctatccctcctcggagttatatgaggtttcaggtgtccctagacattaacagatataggttgcccttgagacatcatcctcccatctttatggccactcaggccctgcttgggaagtaggaatcttttacctatggtcacctatggtcctatctgccttgatgtgctagcactaggtgactacctgtcctggtcacctagaagccccatgtctctggtaccccctcactcccaggcaaaccaggaccctggaagtggtcagagaagagccttgccacttctccaagctgtgtttaaaaaaaaggtcgggggcagacctggaccttcagtcaagacccatagacctttgtttcctcttcccccagcccaggagagtgtcattttctaatgtggggctggaggaaacctgcacactcgcctgctgctccaaggtgtttggtctatattgggaaacctctttcttcaccttttcccctggtaggtaagggcttaaagagcctaaattttggaaaacaaaagccagtgagaattgaagactggatgtcttcttgcctccactccccacctggccccctaaccttaactgggggaatgagcacagagcccgagtcctgcttgaatggggaatgtggagagaagagaaaggagaaaatacacaaggcggagaaacagaagcaaagagagcaaagtcaaccatcatacatgtcttagggatggctggacattcctccttccattgagagtcccatctctacagacatttgagaaacaagtttgtgaaaagtagaagaggaagcggctaagagaattttgcttcaaacagctttcttatctaggtggggcgaaaaagttcccaaaagttttggcaagtggatccaggctttgacaatgtttcaagtggtttcctcttctctgtctcctgccttctacagaatgcctcagttggcatgggtggggtagagagagcatttgctagacttgcattcatcccaggaacaagacagctgaggttgaatgacttcatcgggatgcaccccagtgtgggtggagaggggtgctctgggtgtgtttgccatgcccacgtcttgcttccatcaaagcaacaacagagaaatttgggctggacgcggtggctcacacctgtaatcccagcactttgggaggccaaggcgggtggatcacgaggtcaggagatcgagaccatcctggctaacacggtgaaaccccgtctctactaaaaatacaaaaaattagccgggcgaggtggcgggcgcctgtagtcccagctactcgggaggctgaggcaggagaatggcgtgaaccccagggggcggagcctgcagtgagccgagatcgcaccactgcactccaacctgggcgacagcgagactccgtctcacaaaaaaaccaaaacaaacaaacaaaaaaaaaaaagacagagaaacttggttggggcccaaagaatgcgaggctcctgacctcgcttagtgccctgtccccagtccccagcctggagcttggccaaagcggaccttccatgtgtgtccatggattgaagaatgaatatgaggacccgaacgccctcagtatcagccccgggttcatgctgccttcacacagctttttaacatataccaaaaggagcagggaggcaataaaggaaaaataaatactaactcaaaggagctgccctttcttgttggacctgctgtaaccacacttagaactgactacaagggaaactactttctgagcagaagatccagtggagagaggaagctaaaatgggagggacagatagtctttgaggttcagaaagaaaatatctgtcacgctacaaagccacagtaatgaaaatggtgtggtactggcataaacatagatacactgtgctacatagatctatagaccatgtgaacagaataggaagcacagaaataatgccttgcatatgtggccaaatgatttttggcaaagataccaagaccacacaatggggaaaggacagtctcttcaacaaatgatcttgggaaaaccagatatccacaagcaaaagaatgaagtgggacccttaccttatacaggaaaattaaaatgaactaaagacctaaaagacctaaaactataaaactcttagaataaaatacaggagaaaagtgtcagaacattggatttggcagtgattgcttggatatgacaccaacagcacaggcaacacaataaaagtagacaaatgggaccacatcaaacttaaaaacttctacacatccaagaaaatagagtgaaaatcatcctatagaatgggagaaaataaattatatatgcttagaagttactgtccaaaatacataaggaacttctacaatttaacaacaacaacaaaaaaaaaaaacccgattttaaaatgggcaaaggacggccgggcgcagtggctcacacctgtaatcccagcactttgggaggctgaagcgggcagatcatgaggtcaggagtttgaaaccagcctgaccaacctggtgaaaccccatctctactaaaagtacaaaaattagccaggtgtggtggtgcatgcctgtaatcccagctacttgggaggctgaagcgggagaattgcttgaacctgggaggcagaggttgcggtgagccgggatcatgccactgcactccagcctgggcgacagagcgagactccgtctcaaaaaaagaaaaaaaaaaaaaaaaaggctgggcgcagtggttcatgcctgtaatctcagcactttgggaggcggaggtgggcagatcacgaggtcaggagatcaagaccatcctggctaacacggtgaaaccccgtctctactaaaaatacaaaaaattagttgggtgtggtggcaggtgcctgtagtcccagctacttgggaggctgaggcaggaaaatggtgtgaacctgggaggcggagcttgcagtgagtcgagactgcgccactgcactctagcctgggcaacagtgcaagattctgtctcaaaaaaaaaaaaaaagaaaaaaaaaggaaaaggacttgaagagacatttctttagagaagctatacaaatggccaatacaaaaagacactcgatatcactaatcattaggaaaaggtaaatcaaaactgcgatatatcacctcacacccatcaggatgaccactatcaaaagaacagaaaataagtgttggtgaggatgtggaaaagttggaactctgtgcactgttggtggaaatgtaaaatgttgtaactgttatggaaaacagtatggagtttcctcaaaaaattaaaaatgggtctataatactatatgatccaacagttctgttcctgagtgtatagtcaaaagaattcgaagcgggatctcagagttacttgcacacctgtgttcatcacagcatacgctcaatggccaagaggtggaagcagcccaagtgccctcagcagatgaatggataaagaaaatgtgatatagtcatacagtagaatattatgtatccaagtatatttcttcttttccttaaaaaagaaggaaatcctgtcatatgctacaacatagatgaaccccaaggacattatgctaaagtaaataagccagtcacaaaaggacgaatactgtatgattccattcagtatttccaatcatccatatagtatgatttctttctcaacctcagtactgattccattcatacagtatttgtctacttttactgtatttgtcaaatatggtattttgactactttagatactttaaatgctgaatgtagtagtcaaaatactgtatttggcaaacacagtaaaagtagacactgtatgaataaaatcatgcaatatttgaagtatctaaagtagtcaaaaatcatggaaacaatgtaaaaagggcgctgggggctagggagaggggaaattagtgtttagtgggtatagggtttcagtgttgcaggatgagaaagttctagagatctgttgcacaacaatgtgaatatacttaacactactgaactctacagttaaaagcggctaagatggtaaatgaatgttctacatttttttttaatgacaaaaaaaaaaaaaggcaaagagctggtgtggtggcatgcacctgtagtcacagctactccgtgggccaaggcgagagaattgctggagcacaggagttcaaggccagcctgggcaatgtcgtaagaccccgtctcaagagaaagaaaagatatgttactacagtgaatgtctctgaagcaaatgcctttaaattataaacgtttttcactgcaaggtggaccaaactatgttaccaaacgatagttattcccagcagccagtgactggatttctggccaggctgtctgtcaccaggccttcaccaagcagcctggcagggcagctctggcttcctcacccctaggctcaccaacagtgtgcttgtggaggcacatgcacctgacttgaaattatctccccaaaacatgcaacacatgaaaaacatgaatgttccagtttctgctctccacctctctcccaccatttcctcagttctgggcttcaaatcagagaaggttgacattctcttaagaaccaatcggccaggcgcggtggctgatgcctgtaatcccagcgctttgggaggctgaggcgggcggatcacaaggtcaggagatcaagaccatcctggctaacatggtgaaaccccgtctctactaaaaatacaaaaaattagccaggcatggtggcgggtgcctgtagtcccagctactcgggaggctgaggcaggagaatggcgtgaacccgggaggcgaagcttgcagtgagctgagatcatgccactgcactgaagcctgggcaacagagcaagactccgtctcaaaaaaaaaaaagaaccaatattctgccgggcacgttggctcatgcctgcctgtaatcccagcactttgggaggctgaggcgggtggatcacaggtcaagagatcgagaccatcctggccaacatggtgaaaccccgtctctactaaaaatacaaaaaaaaaaaaaattagctgggcatggtggcacgtgcctgtagtcccagctgctcaggaggctgaggcagaagaatcgcttgaacccaggaggtggaggttgcagtgagctgagatcgcaccactgcattctagcctgggtgagagagcgagactccatctaaaaaaaaaacaaaaaaacaaaaaccaaccttctaaagtctgtaagtcccatagacatccactgagttggcccagtatgccaggcaccatggtaaacatttggcatacacagtctaagtttatcttctctaggactctgcgtattaggtaggtattatccccattgtacaaatgaggaaactgagccccagaggatgaagagcatgtccagggtgacagcactactatgtggtcatcctcgtggctccaaaagctgtggcccactggctttgctgtgctgcctggagttccttgccaaggataagtgtaaagaggaggaaaccagggagtggcgctcactaatagggacgagcccatctatgtcatcttccttctgaggaagcttgaagtcagtaacagcccaggcattccccgtcctccgtgtttcccatgtcacaggtccactgtttaattttgccttccagaaagccaggccttgcttctgatttgctcctttccaccactgattatgcacaggtcaaatgggattaaaggatgtaacagcactccaactgggaaagagcttgggggatgaaggtgacacttcgacacggtcctctaacttggacctgcctcttcgttaggaatcattgttctggtgggctttccctgctgagtgcagagctttgctggcagatcaatgaaggatcaagtccagcaagatgccgttgcctaatgtggccttttctgaatttgtgggaggacaaggcttatctaaaacaaagagcactggctatgagcacctgattcctgttccatctttgtcgcttcctctacctggtcacagcctgtcgagattgccaattcctcattggtgaaataagagcatttttctaggtgatatctaggatgccttttaatccaaccattctgctgaaagaacaaagggatcaatcaattgaatttgggtttcatatgaagaaatattattcagaagacattattggtttgccagaggatctttctttatctgttcaacaaatattagccccacagagaggccaggggtcagaaggcatttcagcagagagaaccgcatctgtgagtggaggaaccgcaagggccttccaggatggtgtgaatgcagtggcccacagcaggtgtgtgaaggggcaggcatggtggcagtgctggatacacctcattaagaaacaaagactaggccgggtgcggtgacttatacctataatgccagcactttgggaggtcaagttaggcagacagcttgagctcaggaattcgagaccagcctgggcaatatggcatgaacccatctgtacaaaaaactacacaaaatttgccaggtgtggtggcgcatgcctgtatttccagctactcgggaggctgaagtgggagaatcacctgagcctgggaggaggttgaggctgtagtgagccatgattgagccactatactccagcctgggtgtcagagtgagaccctgtttcaaacaaagcaaacaaacaaagacaacttagatgtagagactttcatcatcaaagaggctataagtgttcaaaaccctgacaaagtcagaataatgaaactcactaaaatcaggatgcaggagaaggcgtgagaggactcaactttcttatctacactgcctaaacttaaaaccctatgttaaaaaaacaataagtactctaacttcctaacgtttcagaagacttttttaaaacctacgtcttgtgtgtgaaggtgcaatttgtctgaaatttgggtatcccttcagtgtcagtttagtttcattttcgtttgttgaagtcaaatgagcatttgtccttttatttaaaataccatggagagtatgagttcattatcgtagcgcatgctcagtgtatccagcctgcctttcttcctctgtgtatattcacagaggggtgctggggtgaaggccaagcaatgttagcagtggttatttctaaggggtgggatcacagtggccttcttgcttctttgtctctgtgttgtttgatttttttttaagattaacatggaaataataaagccattctaaaaattaagcaaaaagaaaagttttaaaagagcaaacaaaatagcacgaccctgttcgtggcttcataggcagctctcatgtttgtccttccttcttccaccccacctcccacctggctgcagccccaggggactggctgctttccctcctcaccatctcattggatgtttgtttgcatcctggtgaccggtgcattcctgaagggatctgaacggtgaatgcagggccctggaaggcccagaggctgtgcactgcctcactccacatgtgtttgtgataaaaacagggctcaagatgaaactggtctgggacggttcctgccagttttactgtaggtccaaggaaggcccctggatgtatggggatgtatctggactcggatttcactgtattttttttcagttctgaggaaagtatgaatgccagtgttatttattcactgttcagtttctcaagtttgttttagtagttcttgctttgagaataaatatcggaactctgtgaggaaggcattccagaaataaagctggctattcatggcatggtttttggcaaataccttccctccactacggagggaaactctgtttacctttttgaagagtcggcagaaacccaggttcacagttctgccaccaaaagaagaaagcagttcagttcagtgagaggacagactcagcatgatggacaaaaggctgagctgtgctggctaagcgtttgatttcaggagtaaaaaaacgctctttctatgttaaagctgcaattaacgttcttggatagctctcacagtaacttaaataggtaatctagattttctcttacctaaaaggacacttaaatctcattttcttcaataattagaattttctataaaatgagaataataccggccaggcgcagtggctcacgcctataatcccaacactttgggagcccgaggcaggcagatcacatgaggtcaggagtttgagaccagcctggccaacatggtgaaaccctgtctctactaaaaatacaaaaattagccaggcgtggtgggtgcctgttgtcccaattactcaggaggctgaggcagcagaatcaattgaccacaggaatacaatcgcgccattgcactttagcctgggcgacagagtgagactccctctcaaaaaaaaaaaaaaaaaaagaggcagcagggaataataccacccatggtgattatttcactgagttgtggtgaaaacagatgagatctaatgagacgatgatccgagggtgactggccacgaagcacaaacataaagcatcatggaacattggagttggtggaagtcttttccaagcagcaaagtgagggcccttgagaagtgacgtgatttggtggaagccgttccgcaagtctttggaggcaacatgactggaatccagcctctttccactaagccatcctgccacatcctcagctgttttcaatggtgcatctcatgagaacaccactttgttattttgaactttccaggagaaaaagcacaaagtacagctcaaagtaaagttttccagcagatgggcctgaacgagttagaggtccacttcatggaagatggacgcaacatctatgacacgcgtggaaccgggggcacactactttacctctctgtgctttagtttccttaactacctcatcgggttggagttaagaggactaaatgagtgaatgtgttcggggagaggtagcatagagcctggcacatagtacatgcaagattaatgccattattatttattattagcgttattatttatttacacacagaagttgcacacctgcctactgactggaaaagaaaaaggccacagatggaaattagaaagttgtagctatcattaggtctgtgccaaggcatttgggatatatcactaaggcatccaccgaggtgggggtggaggggagccagagtgcctggaggagttactattcctaatactcctattttctcccaagaagaactcacggtctttgggcctagcccctggcttatgactgctggcgggtcggtgtgctcaatggctgcatggccaccacagcatttccacccaactccagcagagccccgtaggcattgtggaggtgcttggggagtctcctaggcttgaataggaatgagccttggaaggtgcagagcttcgtggctcagcagaagatggtgatgagggagatctgacctgaacttccccagggcagcctgggagagcttccagaggcacaggctgaaaatcgtgagtcctcctgaaacttcctttcactgctcttgctccacactctgcatcagccccacccaccgagggctgacccccgactcttccagacctgtttcccatttctcctctgctggggccccccagtagcctgctggtatgctcatgtctgtggctcatgttgctggctcctgctgctgcctcctaccctgctggagacaggcaacactggggccagctcgtatgccacttccatgaagccttccctgatccctcctgctgggccctctcttcccctctccctccagcttgtggttctgctctttgtggccctcacatgtgcacttgtgctatgtatttcattgttttgaagccctcacagccacacagggcgtcctcattgtgttcttcccccagtgcttctcagccactcgggacagtcccaggtgaccagtccattaaagtctgaaaactaatccacctgtacctggagggagtcttggatcccaagcaagggagtgagaattgggacataatattgagatactaccaatgccaacttgggaatccttcctcgtatctgtcttgtgtgtttatagcttcaatttcaagacagaaatatccacccacctgttttgtgatgctaaagaagtatgcacactgaattttgggaataaatcaaaagccgaatgccactacctcctgcttgcttgtttaaaggttagcctttaggatctcttaacttccacaaccaataaaacgtgtttcctagtccttattatggccaatcatttccacattttgttagagtctgcagattaccttggcacgttaatcctgagttctgtcatcccaggcaaatacaaatgctcagaacaaggacttacgatgaaaatgttagtgcactccatcttccagctgcctgacaagcagcttctactcagaataagtataaattagctaatgctgaagctgcagaaatgtttaatccgtatcctgtgtcttgagtgattcctccctcctccccctattcattcagatgttaattctagatctctctgttgcactcagggttgaatctggtaaaatgctagtggtatggtacctgcaggaaggcatatataatttctctatcagagtgcttttaatgccctctttcagtgggcctgatacataagaaaagataaatgcttatgggccccaaaactctttggagtcaacacatgcatgagaaagtataatacctttttaaattttaatcattttagccaaagagcgaaatctgtttttactgcttatgagagatggtgctaaattaaatacgaggcagtgatcttcagaaaaagaagtccccacaaaaacagtgcttccccatgggaagcaagaagcactttaggaagcttagagtggggaagtgatggggtggtgggctggaggcagcctgaatgaagagaggaggcagagacagaggctgagcggcaatggtggagctgctgtaagacgatgctgggggctggcaggtggtctaaaaagccctttcctggatccctgtgggtgtgagggattaaagcctacaggtaaagcaactacaggcccctgccacacctcctcaggtgcttaaagagttgcctctgtgttcccagttgtaaatgagatcatctttggtgatgtctggatgataataaccactctttattacacattttctctgtgctttacagggagtaggttctttaatcctcccaacatccctttgcggtaggtgctgtaagtcattttatagatgaggaaattgaggtcttagagaggttagatcatttgcccaagaccaacagctagtcagtggtagaattgggatttgagcacagagacagtctggctacagagcctgtgcttaccgtaaccaccatgcttttaaatagcaatttttcctaatgaaaattgatagtgtaatgtccagaaggttagaatttaaaaaattaaaataaaacggtctctgtctcatggattcaccaggggacctgggggaaatgcccttgatcttggtttccagtctataaaagaacaattatgccattcttcacccacccatcctacagatgtgctttgaggatgaatgaatagattggtcatcagggctttgaaaacccaagatgattgaagatgcctagttaaataatatgagtaaatgagtttccacatccctgcacaagactcaggcccccaaactggagcagctttccagcaacagctggtttgagattttcaaagcaaatttcacgcacattctatgtaagtccaaaaccaaaatttccttgtggaactttcttttttttttttgcaggaaattcatctgacgtctcactgaaaatctctaaggcaagcatggtgccctatcagggatatggtttccagccttttgtctttttttttttgaggcggagtctcgctctgtcacccaggttggagtgcagtggtgcgatctcggctcacttcaacctctgcttcccgggttcaagcgtttctcctgcctcagccttcccagtagctaggatcataggcatgtgccaccacgactggctatatatatatatatacacatatatatgtatattttgtatttttagtaaagacagggtttcaccatgttggtcaggctggtcttcaacttctgacctcttgatctgccccaacccctggcctcccaaagtgcagggattacaggcatgagccaccgtgcctggcccagccttttgtctttaagaaccaaacattcttctcttgctggccttgaagagggagtttggtaaattgggtcagttaattctgctcccttaaccctatgcttgttagtggtcttcatctcttctacttactctattaggacccgcactgtgggaggctgattactgcagtagactccacactgatttccttacgatgtgtctgaaggggtgtacaaaagggttaatttgtatatcatgaaataaaaaactttcatcctttatccaaaccaaaaggaatgacaacaacccaagcaggtagtattctcatgtattttcccaggaaagttataaattcttgttgtaatctgcaatgcaagtagcatttttaaagatttcaagagacataaatggtcttgaaatgtagtcataaggggaaggtattttggaaaaaataacctgagaaatcgtctcatgtgaacataatcacacacacacacacacacacacacacacacatttgtagtctttgatatagtaatcttgtttctgagaatttatgcttaagaaattatctaaaatcaggaaatcaagagttcattgcatagttgtttataacagcaaaacatttgaaacagtcaacatgtcccagctacacacatgcacgtacacatgcacatatgtatatcccagaatatgcgttaaaaattaaaattataaaagccatgtagtaacataaaaatgcttattatacaaagaaaaaagccagatatataatcatgacaccataccagttacactgtatattttttatttctagctttttttttttgagatggagtttcgctcttgttgcccaggctggagtgcaatggcacgatcttggctcaccgcaaactccgcctcccgggttcaagcaattctcctgcctcaacctcccgagtagctgggattacaggcatgcaccaccatgcctggctaattttgtatttttagtagagaagggattactccatgttgctcaggctggtcttgaactcctgacctcaggtgatcctcccgcctcggcctcctaaagtgttgggattacaggcatgagccacggcacctggcctatttctagaatttctattcaatttgttttctactctgcctcttcatttttcatactgttctgtttattccttatggtcactgtttctttcactattttcttagtaccttaaacatacctctctaaatactttttttccaggttgttctcagggtagattctgtttgttgtgatgttcatttccatgggtcctctataaaattttcctgtgagctcctcgtcttctccaagggttgttatctgtaggactcctctattccctggcctgggaggtggcgatgttgctttgcctttgcaaaaccctagtaattttaacactcttaggcacatagtgcatttctgtaccaccttcctggaatggctgactgaggctgaattgagtatgaatcctgaatttgttgaaggagctcacttccctagcaagggcctaattgcatgcctgttgcacctttgggttcagctctcacaaaccattagatcccgcttgctttctggtacctaaacttcctttcctgccctcaaactctattgtgcattaaaaaataacttatcgccagggtggtggctctcgcctgtaatcccagctactcaggaggccaaggtacaagaatcgcttgagcccaggaggcagaggttgcagtgagccaagatggcaccactgcactccagcctgggcaacagtgtaagactgtctcaaaacaagcaaataaaacccttatgctttacccatcatttccacatgtttgtagtgggacattcatattaaccataagtacctatttatcttttctatttgctgcaactatatgaaaatatatatggatataatcagactggaaaggactttgaaaatggtatttgttatgggtagagagagtaggtttattgtaactctagtttgcaaacactctgtattaatatattgccttaaaaacaattgttataagaattatcttttaaacaattctcttctgtttcagaatgcatatactacaactgctattaatgggacagatttctgtacatcagcaaaagatgcattcaaaatcttgtccaagaactcaagtcactttacatctattaactgctttggagacttcataatttttctaggaaaggtgagatatcttgactaaataaaggagcctgggattctgaaaattaagccatacaacaattggtttgaaagggaactatatttcttgagtacttactctatagtgggtgctgtgcttcattatctcatttaatcctcaatcccatgaggtatccctactttgcagaagagaaaatgaaggtttaataacctttccagggtactacaataggtagagccagaattttaatcttagtcttactctcttacctgtgatcagttctaccattctgattccctctttttcaggtctaaaatgaaaatgctactaatctcagaaaatgaacgtttgtgggtttctcattaagaatatatggaaagagtattgaaacctggactgggcacagtggctcacatgtgtaatcccagtattttgggataccgaggcaggcagatcacttgaggtcaggagtttgagatcagcctggccaacatgggaaaaccccgtctctactaaaaatacaaaaattagccgggtgtggtggcgggtgcctgtaatcccagctactcaggaggctgaggcaggagaatcacttgaacctgggaggcggaggttgcagtgagccgagatcacaccactgtactccagcctgggcaacagaacgagactctgtctcaaaagaaagagggatggtttctaaaaaaagttttaaagtgaataggcttattttggtgttaagtgaaaaagcagaataaaaagcttgtgagatattattacatttatataaatacaaaagctaggcacagataaaattacatataaccttcctactcgccattaactgggtttccttttgatacagcttttcattttttcctctatttcattctgccaaaatttctgacaagcattctttacaatagtgcacacacacgttgcacacaggaacgtatattaaaccattacttgtaactgacaaaaacatctaagcaactgattcataaagattttcaacaaactcttcttttgcacaggtgttagtggtgtgtttcactgtttttggaggactcatggcttttaactacaatcgggcattccaggtgtgggcagtccctctgttattggtagctttttttgcctacttagtagcccatagttttttatctgtgtttgaaactgtgctggatgcacttttcctgtgttttgctgttgatctggaaacaaatgatggatcgtcagaaaagccctactttatggatcaagaatttctggtaagcaaacatttcatttccaattgcaatctccatgctcgcaatcttgaaagttttgtaaagctgcacacacgaaagaggctcatacccagcctctctcttctagagggctctgaggcttctactacccccgggcctgaaagtgggatttgcgctgaactctccaaggctgaacccacctccctttctgagaaccttctccctgaagaagtgaagctgaacaagaatgctgatcagatggattcctaagtagcagcagcacttcttaccctgggcagaagatgtcctgaacacagtagttcagctccctttggtgctcatggcatgatctggccttttgggtggtctagaagtttaacagttgatctttttctaaagcatttttgcatctccaagcatgatgttcatacccactatattagggagagcacacttgtgtgctcctctgtgccagtattgacagatctgcaattctcaggccctttattagcccaggcacaccagtgtgagaaaagccacaccctcagcggagcgcccatactgcttatatctggaaatagcaggcagctgtttgcaacagcctttgcaacacagttgttgcttatttgccttatcctgggtagacagggatattttaacagctgaatgatgtctcatctcttttccttgtctgagttatatgatatttgcatacttttctttcattctgttgccataaaaattaggtgttaaagcccttttagctttaaacagagcatttaatgcactctttggttcagcaggcactcaattttttaagaaccacttctacaatttataattaatgtatcctcatccttctccatataaaacataaactacaaattttacttttttttttgagacagagttttgctcttgttgcccaggcttgagtgcaatggcgcaatctcagctcaccgcaacctccacctcctaggttcaagcgattctcctgcctcagcctcccaagtagctgggattacaggcgtgcaccaccacgcctaattttgtatttttagaagagacggggtttcaccatgttggtcaggctggttttgaactcctgacctcaggtgatccatctgcctcggcctcccacaagtgctgggattacagttgtgagccaccgcactcagccaaaatacaatttttactttttacttgtttattgacttatttgtatgtactctaaggaaagtgcttatgatggtggtatgtagctagccaggtctccatcccctgatttacttttccagttaaaaatccaccttgaaatccgggcactatggctcacacctgcaatcccagcactttgggaagccaaggcaggtggatcacatgaggtcaggaatttgagaccagcctggccaacatggtgaaaccctatctctactaaaaatacaaaaattagccaggcacagtggcaggcgcctgtaatctcagctgcttaggaggctgagacaggagaatcgcttgaacccgggaggtggaggttgcagtgagctgagatggcgccattgcactccagcctgggcgacagagggtgactccgtctccaccacctcccccccaaaaaaaatccaccttgaaatttaccccttaaaatagttttttcaacagaagaaactttcttaaggatccagttatctgaaatttaaggccaagaacttgtaaatggctatcattgggactcagaaattgatactccataatatggcactttgacatgctgaactgaagaagcctcaagaactctctgaccttctcccaaagcacaggatgaagctgtcatctgaatgaaatccccttatctgcctaaagtccagacccaccaaagaaaaaaaccacctctggccccttccctgagttttccattaactggacttatatagcagaaacaaagactaaattcagtcaacacacctggacagacttttgtcacaaaccactgtcctgtgggcccaacagactttgttcccagccactaagtgttcttcaagctcattaaactcccctaaaagtaattcaccacccccataaaatcatccacacttccccatctccctttcccaaaaacagaattatctgtaccccatttagacactcactgtgattctcccctgtgctactttatatgccatttctcctgttaatctgccttttgtaagttaattcttcagcaaaccgtcagagggcaaaggagaagttttccctcggcccctacgttatcaacagtacagacacataatactattctaacttgttcttttgtttttcagagtttcgtaaaaaggagcaacaaattaaacaatgcaagggcacagcaggacaagcactcattaaggaatgaggagggaacagaactccaggccattgtgagatagatacccatttaggtatctgtacctggaaaacatttccttctaagagccatttacagaatagaagatgagaccactagagaaaagttagtgaatttttttttaaaagacctaataaaccctattcttcctcattgtctttgtcattattgtttgaccaggtaacaatactggaactatattagtttacctttttttgtacaaattaggacagaaaaactcttctaaaaccatgtttatatgcatcaacttacaaagtacactatgtaagaactgaggtaagtttgtaagtgcacaactaataaataaacctttttaagataaggattttgttagcagaaatctctggattttttttttttaaagggacagcatctcactatgttcccaaggttggagtacagtgtctatgcacaggtgccatcatagctcactgcggcctccagctcttaggctcaagtgatcctcctgcctcagcctcccaagcagctgggactacaggcatgccaccatgcccagcttggaaagttgcttttatacagagtaggatacttccctactcagccaatcctggaaatatgctaaatggattaacttttcaaagtacaattcttagatttggtgacaataaaagccaaaactgtatactctaacatgaactaccacctgaactgggcatgtacaggagaggcaggagtgtaaccaatgatttagtctgtgcacatgctcttcctttttttctgaatactcttcctcctctttgctaatggcaaactcctacttattcttcaaaacccagctctgatagcatcatgcttctgcaatgcctctgagcagcattacttgccctctcttctgtccttttcctccatgctcttctctgatatgactgtgaatccactttctgttatgtctctccaccagatcacattccgtgatggcacacacaatttatccaaactcctgatacacaagcactcctcttacagcagacattctggaagaagtggttttcaaccacagccccacctgagaaattacctggagacagatttttaaaaatacttctgcctggacctcagagatttatgtagatgggagtgaggggaagagcttttcgtttttaaaactctaaccaaatagaaacattttaacatgttgattggcagcctcatgggaatcaatctgacttaaatggcagggcaggtagtgtgatataaggcttcccttccctaaactttgaagagtcaaagatgacaaggaaagccttagaactcaggtctactttaaatgcaatgacttttttcttaaatgccactattgaattaggttgactccaatagtttcctttacaagcagtttcccagaagcattaaacctagtcattgtggaatgatgagcaaatagccttcacttttgtgggctcatcaaaccatgtgtatatactcctcatctctcagcaaaaaacagacggttttcgcccccaaacctaatagagccaatcctattagaagacatggcttggctgagacaatgtcggaaagtgtgagttactaattttcttttagtgactgcatttttgtcactatgacacctagctattgtttgtccttccctctgtcaggactgaaggtttatgtttcactataaaccctggcttattaccaagcagcacatcctatggctgacctagcatgtttcttattcatgtttacttaccctaagataggaaaattccccacccctcctgtcaatattcctaaagattttaagattattccaagttgaatttaagatgaatctgggccagccaagtcagtgaaataagcaagggtcagaaaatgattagaattctgtcatttactatgtgtaatggtttcctaagcctcaatctccttaagcatagagtgcagtgttgtgtgaagtaaataaaatgttaatgtaccttgtaacagtacctaggaaaaaggtacttaaaaaaaaatctgaccctacctatctagaagctagccagaaaataatcagcctgtggttcatatgaaagttcaaaaaaaatatttatttataaaaaatacaatgggataagtttatgctgagaaatgcagcaataaatacagttgaagaaaacagagcaactctacattgatacattggcacaaacaggaagagcaaatgcatcacccaggcctaaatgtccacaggccacttttgtacatgctcttttagaaacaccactctgaaaagatcttgttcgctaggtaagagaatgagtacacatataatcacaaatgcacactgatcatgactttatttaaaaattagcaaacaatactgtagaaacattgatatgtaaatttctaaaatgctgcatcttaaatttagttggcaaagaccacatttagcaataagcatgagtttagtcttccatgtagaaaccagatacactaaactgtaaaaaaaaaaaaaaaaaaaaaaagtttcctattgtttgaaaataccagtttaatataagattgtaaaaatgcatagatttttgcataaaagaactggctgtacaagagtactcccctttcacagtattcctttttacttcatatgcgagttattgattatgctgtaggatttaactattacagcactaaaaggcaactattgagggaagaggcagaaaaaggaaaaaggaatgtacgtaaggcaatttttcttaaaagtacaataagcttaatagtgttttaggaagacaagataaaaattactcaaggctagcttggttctcactgaataaaaacaaaggactaaatactgagctccttctgtgtggatctaataatcaatgccttggtcgctatattggtaatctctggggtagtcatcctggtactcgccatgatactcatcagggtattctgcctgataatcactatcactgatttccgaaccatttgttcctgttccttggcttccgttgtgaatgacaggttctgtaggagcagcacagtatttgggatcatatacttgccgcccaagcccatacacactcattcctttctgggaagcaactttgttggtacccatctgtagggaaattgtcgagttgtccaccggctgtaatgttagcttctgatcatagatgtctcttctggtacctggtgctaacatccctgcctggtattagaacatagtataaaagttaaaacagcagctagaatctattcttgtgaataatttataaattatagaattcacattgaatatgaacagtaatacatgaactttcatttggttcaggggtaaagctagcttaaccaaaatatcctgataccgaatcacttccatgaagcaatattcattggcttttgagctaggtgagacctttcttcaaaatccttgctctgctataaaattactatgtggcctcaaacacgtaaatttagctttaggtttctcaaactgcaaaatggagacattactacctactctggatttaagagagaatgagacataaagaatgtgaaatcataatgcttccacaccagaaagttccatgtgaatgcccatggggaccacatacattatctgggttaccaatttcaaaaatttataatatattcaacagaaactatgttgagcagatcttaaggacttgagtcttttcaaaaggctgagatacagaagaaccagccacttcacagccactcccctctttttcagagtacagtaactcatacttcatctctctacttacatcaagcacacacttccaggttcagagtgggtagaaaagtaaacgtgagtggcagctatgagagacataatgccgcacccggtaggatgtgttccataagggcaaagtttgataaatctcccttggactcggtaagaaaatgtttttcaaaccctatcccagctgttgttggatgtgagacctgtctgttctcaaatggttgttgaacttccttctgaggtgctggtgatctatttttaacaaggaaatatttctatcttggatgtggtatactggtattttcaccatgttgcatttccatctccttatattgacacatctaataggaatgctagttaaatccttcttagtggaacaccaggtaattttacctattaattaagggctccttaaaaaaaaaagtcagcatttaaatgagcaatattttacttggattttggagcaagaacactgtaataaacatatctttttttctgctggctaggtagaaaggccagctgttctaactgccaacaaaaaccacgagacacatcatgcttttgctgctatcgaaaaggtcttttgattattttgctttcccagcaaagtccacattcctgaaggaatatactctaaataaactatacaaaaaatacctactttaaacttctggttaataaaaataaggtaagtgtactcttgtacacgtataaaaaggtattgcttacctggctggctcctttattagtgcccatctgcagactaattgtggtctggtcaaaaggtttgtcagtttgcattttgggatcataaagatgcctcctagtcccgtaagctgtcatacctgcctggctggcacatttgttggttcccatcttttaagttaaaaataaaattgcacaaattatcagatgtcaacaatatacacaacacaaacaaaactttccatgctaccaaaaagacagaaggggcacaaccgacaagttactgagctgaggctccagtcaactcttctatgtgtctacaaacaaatttcaagtgctaactttaaaaagaaaatttaaagtcactatagataaaaactcatacatagaagaattaaacacactttaacaggtggactgacacaccaaaagtcattacagtggcagaataatttcctctgctactctttccccagataaccaaattaagaggtaccagcttcggttatttcaacagaagtaatcctaggccaagcaatatgctgttctactccaggaatgttttacataaaatgtgaaagcaaatgccaagtgttttctctgggagcttaacaagggctttttaaagtttcaaaatcaccaacattttctccagaaaggaaccacattttattcctgtaactcccatgtccttggacagagctggagaaaggtggaatgaggaatttgaactcagcaaagttcagggaaacaataattaatttttcttccccactgagaacagtatggcttcaggaccaaccattacaccctgttccactggttaggcacacttttctgatgttggatattttttctttaaaaataagattaaagaaaatctttattactaatataaaatctgttcattgaagaaaattcagaaaacacatataagcaaaaaggaggggggaaaaatcattgtgataccaccatccattcactgtcaacatttgtgaatatccttttagctttttaacctatgtgtctatgtatatatctatagatgcacatatatacaaatacatacaaaaacatgtgcatttttaattttaaaaatccatactgaccacagtatttgatgatctgatttttttcccccataacctatcttttcaaactctagtgtataattttacattacactttgcttttatggagttgtaattcaaccaactgactactgttctgaaatttaggtttccagtttctcaccaccaatacaattttgtactgtgtaaaaataaatctaacttgcatagactcagtagaaaggggcactgtatcaagcaggtacagtggcttttggagagtaaagccaacagcatttggggaattagcaatgacgtttccatgaccagtgaagagaacaatgaagagaaggaaaacatctgaactacgtatttcagaagaatttaaactgacaaattctaacagggcttggctgctatatcatgatttggtactgtaaataagtgactttggcattaaggtcgtgtaaaattgcctaatttggtcaataacattaaggaatttataaagtacatttctggctgggtgtggtagctcatgcctgtaatctcagcacttcgggaggccaaggcaggaggactgcttgagctccagagtttgagactatcctgggcaacaaagtgagatcccatctatatataaaagataaaacaggccaggtgcagtagttcacgcctgtaatccaagcactttgggaggccgaggcgggcagatcacctgaggtcaggagttcaagaccagcctggccaacatggtgaaatcctatctctactaaaactacaaaacttagccgggcatggtggctcattcccataatcccagctacttggcaggctgaggcaggagaattgcttgaacccaggaggtggaggttacagtgagccgagatcgcgtcactgcactccagcctgggcaaaagagtgagactctgtctcaaaaaaaaaaagataaaataaaaaatttaaaagtgtatttttcttttaaaaaaaaaaaaaaaagacaatatgattcaattaaaaattttcgtttcctggagaaataattgtcaagtcaggtggcatacctgaggtttcctctaaaaaattatcactgtcttatgggctttataaatagatataaattgtataaactacaccccccccccagtactatagtacttctatctattcttaggagaggcttaatattttgcatggtgagaattaatcatattgaataagtaattgaataagcaacaccacattacttacctgcagaccaattacactttggccagcttttaattttccttcatcaaaacgtcttgtttgtttttctgcatacttaactccaatgtcaatggttgtatggaatccttttgttttagcctagacagaaacatgcacactaactgaaaaggccaacagagtttcacagaaggaacaacaaagaaatgatatgtccatagacaaaggggcccaaactagagataaaaagtatttaaggctgttcaataatatactgcatcatttgaaatgtgagtgttctaagtaagctatctagtacgatgcagctgatgtcagcagcctttccacaaagctactaattacagaagagacaggccccgccccacctggtctgaacccccatgaaaaagcaatgatgcaattcatcaccaatgtggtgggaatctgttaaccagccattaaagacatgtacgtaccagacctgctagagccaccagagtagtctgaacctgggtcatgtttccattctcaaaaagatcatttgcttcgaatatgtcatgtggcttcataccataagcctgaatagctttaataaagttgccaatattctccaactataaagaagaagagttttataatttctggagctaaatattgacattcataatttctaagaattccaagtcttcataaacagttataagacgctgcccagaaagctgtttgacaaggattcaaccaaatacatactaagcatggctctctctggaacaggaaagagcaagaagagagtgtgtctctcactgtgggtcacatcacagtcttaatatttttaagcagttacgtgttttcagtttttatgggcaagatcttccttatatattttaaaaggattctgtatcagagctatccaggcctggaattttatttgtcaaaaggtatataattactcatactaataaataattcattatgtgttattttaatttcagaatacatttgtggttactaaatactcattctctcatatctccaaacacatgttcaagaccagtaagtatcccattttccttcctcatacacactcatgaactaaggttatgtctgatacagtgctctgcagtccactgttagttatgtggaatgccttgttttttcccttatccttaaggtctgggttgcatttctctgtgtaagctgtgtcaagtcctttctgaatgtacacagactaaatataggaaaacttctaagctaaacataataattacagaactagttaaataagtaattacagaaccattacaaaagggcaaaaaattaaatatgcacaaatttctgctacaatgtctatgtaaaaaccgtaatcaaaaagttaaaaaaaaaaaaaacacaaaaccaaaaaaccaaacctgaaatcaagttttcactacataaaatgcaaccaactagaaccagaggtggttggtttggctgttacctgaggccagttcagtgaggactcgttgaccttcttcactgagcctggctgtagcttgtttataagtctgaaaagaaaaatatgagagacatcttatttactggcacacaaaaacaaggattgaaatatcaagttgctccctttagcatcagtaagggaaagcattaaagatatctgtagaatatcaaggtctgacaccctgggctgagaaggagagtgagagagaaggctgtggaaagaactggaagagcagaaacagattctggagggctgtaactcactcgcagaggatgatgccatcctttaagcccagctggaagttggggccaatgctcatgcctgtcacctcttctatccaattgcgaagatcttcttctgcctgatgatcatacttggaagcaatctgaaatacaggttaactcactttagaagaatttcacaaaagcatcagaaactgccgactcacaacgcgctctgctttcactagccattaagaccacagctgtgaagtgtagtaaatgacactcaatagatctcaatggcaaacttaaccgttacaacttcagtaactaataacaaatttttggtgaagaccgtgtcatacaaaattttgaacagaccatggagaggctgggactgacaaggagagaacatcaatcaagagacatcagatttcatgatccacaggaagtgacaaggatttaatggtatgttacaatatggcactcaaactttaaggtttaagtcattaatcaccctattccaaaaaaagctggggaaaggattctgacacatgcagttattttacagagtatctcacctggccaatacataacattccaatagttttgttgactggaaagttctggtatttgccttctattcagccaaatacacactatatactaaacacacacacacacactttcctcagtactaattactgtacaatatttaaattctgtttatgtagtctctatcctattagacttcttacaggcaggaaaagcatctagttcattcagattcttagtatctagaattgaacctgacacccaaacatgtgataaaactaaaagaaagtttaactttttacttgcagaattcaaaaataaaggccaacttaccaacacaaatgctatgctattatacatggtaaaactattaaacataagttttgaaagatccctttttaataagaccacagacctcaatttaaaataattgaaaaaataaaatttaaacaaaatattgtgaaaaaaatcacatgcccaagttcttaagctatcccttgtcctggagtccccttaaagtggctggtcaatcagggttatggagaacacagctgaggcaggcatagtggctcacacctgtaatctcggcactttgggactgagctgggtggatctcttgagtcaggagttcgagactagcctgcacaacattgagagaccttgtctctactaaaaataaaaaattcagctgggcttgacgatgcatgcctgtcatcccagtgacttggaaggctgaggtaggaagatcacttgagcccacgagatcgaggctacagtgagccatgatcacaccactgcactccagcctgggcagcagagtgagaccctgtctcccgccccactgccaaaaaaaaacccacagctgggaagaaggaaagatccagtatcatttgtcttctcattcagcactggtgaaaatgccaagtatacataggaaatgctcaggagatagagatcatgagcttgggaatcaattacatcattggaaatgggaatgaaggtagaaatgtctgctgtgtccataagacatagggaggtttaatcattggaagaaatgaaatggcatcttgacattttagtcacaaagaagtcccacaagttccagtctacaccactcacggaggaaccaagcagaactgtgggaaatgccctaggttcatagtgccagagcatataggactgtgggctgcattcaggtcctttccaagggagagagcctgatcaccaggatcaggacagacatttacgaacctggccagcttacctgtaagtcacccaacagtgaaaaccaacgctgagtcttaaaaaacagattcaaagcgtacacttgatcaca

SEQ ID NO: 824 - DNA, 2390 bp, Homo sapiens
cagccccagccccggccccggccccggctcgcgggcgctgcgtctccgcgtacaggaggcggcggcggctcccagtcaccggcccccgccggcgagcgcacgatgcactgcctgggcgccgagtacctggtttctgcagaaggagcccctaggcaaagggagtggcgaccccagatttataggaaatgcacagatacggcatggttattcctgttctttctcttttggactggtttggtgtttatcatgggctactcggtggtggctggagccgcgggaagactcctctttggctatgacagctttggcaacatgtgtggcaagaagaactcccccgtggaaggggcccctctttcagggcaggacatgaccctaaaaaaacacgtgttctttatgaattcctgcaacctggaagtcaaaggtacgcagctcaaccgcatggccctctgtgtatccaactgccctgaagagcagcttgactccctggaagaggtccagttctttgcaaacaccagtgggtccttcctgtgtgtttatagtttgaattccttcaactatacccacagtccaaaagcagactcactgtgtcccaggctaccagttcctccaagcaagtcatttcccttatttaaccgatgtgtccctcaaacacctgagtgctactccctatttgcatctgttttgataaatgatgttgacaccctccaccgaattctaagtggaatcatgtcgggaagagatacaatccttggcctgtgtatcctcgcattagccttgtctttggccatgatgtttaccttcagattcatcaccacccttctggttcacattttcatttcattggttattttgggattgttgtttgtctgcggtgttttatggtggctgtattatgactataccaacgacctcagcatagaattggacacagaaagggaaaatatgaagtgcgtgctggggtttgctatcgtatccacaggcatcacggcagtgctgctcgtcttgatttttgttctcagaaagagaataaaattgacagttgagcttttccaaatcacaaataaagccatcagcagtgctcccttcctgctgttccagccactgtggacatttgccatcctcattttcttctgggtcctctgggtggctgtgctgctgagcctgggaactgcaggagctgcccaggttatggaaggcggccaagtggaatataagcccctttcgggcattcggtacatgtggtcgtaccatttaattggcctcatctggactagtgaattcatccttgcgtgccagcaaatgactatagctggggcagtggttacttgttatttcaacagaagtaaaaatgatcctcctgatcatcccatcctttcgtctctctccattctcttcttctaccatcaaggaaccgttgtgaaagggtcatttttaatctctgtggtgaggattccgagaatcattgtcatgtacatgcaaaacgcactgaaagaacagcatggtgcattgtccaggtacctgttccgatgctgctactgctgtttctggtgtcttgacaaatacctgctccatctcaaccagaatgcatatactacaactgctattaatgggacagatttctgtacatcagcaaaagatgcattcaaaatcttgtccaagaactcaagtcactttacatctattaactgctttggagacttcataatttttctaggaaaggtgttagtggtgtgtttcactgtttttggaggactcatggcttttaactacaatcgggcattccaggtgtgggcagtccctctgttattggtagctttttttgcctacttagtagcccatagttttttatctgtgtttgaaactgtgctggatgcacttttcctgtgttttgctgttgatctggaaacaaatgatggatcgtcagaaaagccctactttatggatcaagaatttctgagtttcgtaaaaaggagcaacaaattaaacaatgcaagggcacagcaggacaagcactcattaaggaatgaggagggaacagaactccaggccattgtgagatagatacccatttaggtatctgtacctggaaaacatttccttctaagagccatttacagaatagaagatgagaccactagagaaaagttagtgaatttttttttaaaagacctaataaaccctattcttcctcattgtctttgtcattattgtttgaccaggtaacaatactggaactatattagtttacctttttttgtacaaattaggacagaaaaactcttctaaaaccatgtttatatgcatcaacttacaaagtacactatgtaagaactgaggtaagtttgtaagtgcacaactaataaataaacctttttaagataaggattttg

SEQ ID NO: 825 - protein, 648 aa, Homo sapiens
MHCLGAEYLVSAEGAPRQREWRPQIYRKCTDTAWLFLFFLFWTGLVFIMGYSVVAGAAGRLLFGYDSFGNMCGKKNSPVEGAPLSGQDMTLKKHVFFMNSCNLEVKGTQLNRMALCVSNCPEEQLDSLEEVQFFANTSGSFLCVYSLNSFNYTHSPKADSLCPRLPVPPSKSFPLFNRCVPQTPECLFASVLINDVDTLHRILSGIMSGRDTILGLCILALSLAMMFTFRFITTLLVHIFISLVILGLLFVCGVLWWLYYDYTNDLSIELDTERENMKCVLGFAIVSTGITAVLLVLIFVLRKRIKLTVELFQITNKAISSAPFLLFQPLWTFAILIFFWVLWVAVLLSLGTAGAAQVMEGGQVEYKPLSGIRYMWSYHLIGLIWTSEFILACQQMTIAGAVVTCYFNRSKNDPPDHPILSSLSILFFYHQGTVVKGSFLISVVRIPRIIVMYMQNALKEQHGALSRYLFRCCYCCFWCLDKYLLHLNQNAYTTTAINGTDFCTSAKDAFKILSKNSSHFTSINCFGDFIIFLGKVLVVCFTVFGGLMAFNYNRAFQVWAVPLLLVAFFAYLVAHSFLSVFETVLDALFLCFAVDLETNDGSSEKPYFMDQEFLSFVKRSNKLNNARAQQDKHSLRNEEGTELQAIVR

SEQ ID NO: 826 - DNA, 118864 bp, Mus musculus
  misc_feature (1)...(118864): n = A,T,C or G
attttcagataatttagctttctgttcataagacgataatgcttccttcctccatccttccttctctccttcatccttactcttctccgatgcttcttgtcacttggaggtacaatgcttggtgcggacatgtgagaagaatgcattgtcccgactgaattcacacccctcgtgaggagagttaaaggaaaatcttcctctcagcctcataccccatcccacctggctctcacacacagaaacccaggggtgagtggagggggtcacagtggacacacggtctgaactgagttatgtctgtgtttggggacatggggatggtgggaggggacagggttgagtgatgtgaagaaggctgtgagatcgaggtagcaaggctggaaacatggaggacaggaatggtgggatggaccagggaagggagacgaggcataagcatctgcccttcctttcctccggacggcagagtgccacgcaaagcactgaatcagaatgtgcttggaaagctaaattctgcacagtgtaacgtcgtgtagattcagaaacagatgagatcccaattggtgatggcatcgttgaccaggacacaagttttgggatccttttgatgctcctagggaagaccttctgcccgaatgataattggaccaccagaatttcttcttaggccccactggtatagtgtgaatacctcagaagtaagaattaggctcctagatgagagtcatctctgtggtaaaatgattagctgtttctagaagggaaatgcacttggtgagttgcctgagaaggaagccgaggtgtctggactgattgcctagtcacctttctcatccctggccgggtagttgctctcctcccttagtcagtgacagagtcatacagagtggggcttcatcagggccaaagaatgtttttcctgtgtccaaaagagttggatgtaaagaaagcacttcatggccattgcttctgctgttccgctgttagaagtaactcctctgcttgtatttctgtgactctctgcccagccacagtacaagactttgctctcagcaatctttttcatattgaacacatgtactacagtaacatacactagtaggcaagtgctaaagaggactaagcaggaggatcgtgtgttcaagaccagactgggctatacttggtttaggatatagctcagttggtggaatgcttgcctggtgatcaagaagccccaaatgcagtccctagaacctcaaaagactgagtgtgaaggtcagtgtgtgtgtgtgtgtgtgtctataatcttatccctcagaatgtgaaggcagaagcatcaccaggaatttagggctgtccttggttatctagtgagtttgaaacatcttgggatacataaaacagggtctggtggacacagtgagagtcttgcaaattcacaaacactgtgacagcagacacaagacctatacaagatcaagccagccaacattctgactttagctgggggaggggctcacagggccctacccatgagaactattggaaattgaaggtttccagaaggttttcttttggtttgtccgtgctccagtggctgggtctgtattgtgtgcatgtagtgtcagtagtagtctgggctataaagagaaagaagaggctataaagttgggaggaactcataggggcttttgtaggtgttagagtggagtagggggtagatgtgataaaatacattgtatatatgtacaaaattctcaaagaatggttaaaaaataactaagctttcccctgaaggaagtgaaagaaagcattgcaggtgtattaatagctcatgggatgcttctctgtgctttgagcacaggtcagaaggttgtgcaatatcatgtggtacctttaaactcctcagtatggtcagtaagttccagccacaagaggtccctttcgagggaaaccagacaaaaccggacttcctgggacagcgacggccttaggcttttgtcctctggggttgctttctgctcagagcagtaatggtggtggtggcccttgagctccttctggccctgggttttgccttctgtgtttgtaatttctactgattaataagtccatgtcttaccatgatagactgacaagcaagcatgccaagttttttttaaaggggaatactgggctgaatgcatggtggtttctttgaacccccaccccacccctttatttttattgagaattgacctaagagtttcactgggcaccctcatggagactgtgttggttgatcggcttgccgttgttgtctcctccctcccctgcatagcctcaagccaggatcctccccaggcggatggactttttctcatctcccaacgtatacccacactccctgccccccccccccccattccacttttcgaagctggggtctacttatgggagagaatatgctatatttgtctttccgagcacggcttattccatgcgatgtaacttttccagttccacccacttttctgcaagtttcatattttagtctttctttatggcatccctagtgaacatcaagtaaaattccgcttgtatatataccactttttcattacctgctcacgtgctcaaatttattttattagtatgtaaccaccaaacagtttgccttctagcagggtgggtctaggttctatgggattacggagctgaggcgagaagccacgcctacttcatcacgtggtgcctgtgaatgctcacactaagacaaggcttccagtgtctgggagaactgcaggaggatcactttattttccctccctgctaccaagtctccctagtatctgtctttctaatactgggaataaagccagatttaggggaaatgaattaaatttgtccacaattactgatttcaaagtaagtataattactatgcaccgtgtcagtctcttaattttccatatgaattaggaatttgatatgttgacacactatgtttcaaaacctacttagagctggtttctgaacctgttctctgagagcattcctgttggcaagagtggtttggtggtttcaataggaatggcccccatatttaaatgcttggtcattagggagtgacactaattgagagggtttagagggtgtgaccttgttggaggaagcatgtctctaaggatgtcctttgtccaccagaggggtctcttctcctgcagccttccaatcccaatgtagaactctcagctactatacctgcttgcatgccaccatgcttcctgccatgccaacaactgactaagcccctaaaactacaagcaagcactcgggaggcagaggcaggtggatttctgagttccaggccagcctggtctacagagtgagttccaggacagccagggctgcacagagaaacactgtcttgaaaaaccaaaaccaaaaacaaaacaaacaaaaacaaaaaaaaaaaaaacccaaaaccaaaaaacaaatggtttcttttataagggttgccttggcggtggtgactgagacaaatggtaattaaagagtcggttaatgcacatgcagacctcaggctctgacttcagaacaggatctcgatgcctgcgtttatttttctcttcgtccgtgactgtgggtggggctaccagccccacgcctctattgcttatatattagattgtatatgcagctacagctatatcactcactaagtgtctgctaagatcgtgaattcacccctgcgtttatcctctccttggacttcagtgccacactgaccctgtggtgaagaaagggtggtctctggagtgactgccactgcggctttaagttgatgttcattagtcacgcctgatgacgtaactcatcctggctcttgatcatctttttccttcccatctatcagccatgccacctcaaggggaagcattccagaccaagcctggccctctctgtcccatgcatagaccccagtgggttctagagttctgctgcagattccccactgtgctctaagaactcttgcttgactcctttctgactcctgctcctccccttctgccatccttggaattgtttgtaaaatatttctttttttttttaagaattgccattgtgggagctggagagatggcacagtgagtggttaagagcacttttactgatgttgtagaattcacatttgatccccagcacccagatggtggttcacaactcctcataacttcagttccaggggatctaacacccacctctggcctctgtgggtggctcctgcgtatacttggtacacataaactcaatgtgtgcatgcacaactatgtgtaaatagaaataatttgaatgtttgtgtaggtatggttgtgtgggcatgctcacatgggtaggttcaagtgtgcgtgcatgcttgtctgtacatatgcatataaaggccaaagatgaattttgggtgtccttcctctgaacctactaccatattactatctgtatgtttgtgcatgtgtgtgtggtatatatattggtgtttctgtgagtatgtgcacaaaggccaacctctggtgtcttcctctatcgctttcatcttactttttgaggcaggatgtctccctgaacctggatctcatcgttggacaagctccatgatgatactctctctaccctgcccctagccccttagctggagttatagacttatgccaccatgtccagctttttcaatgggttctggggatttgaacccaagtctccatgcttgcgcagcatgtactttaccaactgagccatctcccttgcccctccacccccagcttccttcctgctgagactggttcttaggttggtgtggttgtgtgtctgagccccaggaatcatcctatctctatctcagcagagcttggattacaaagccaggttgctacacttaactttacatgcatacaaactcaggttcccacatttgcaaagcaaacagtgtacatcggaatctatctccctagccccaagtcttgaccatatcaagaattcgacaccagctttctaggttctcgcccacttaatttccctgcgctgctcttgtttgacctttagtaccctctcgctgattatgtcagcgattccatcagcagctctgcagcctcaggctgccggtgacacggtactgcccgagacacggtacctcctgtttcatgctttgaagttggttgagcatcatgtctcaccacggcactccacctttttatcatgactttcctgacccctacctgacaaaaaccaagtgtgacttccccagaggccactgtcacttagtaagtgggacctgtcagaacatcattgttgacgcaacagataaggagaatgaaggttttactcatacactctgagctctgctagcatagctctctgcaaatagtatgaagatttactatattcatcaagaagacaatttggagctggacaacgatgagaggctgaaccgcattgatgatgtgtttcaatctgagagagaactggtattagctgggatcacagatgagcaacaggcggggactagccaggctgtgaggcgactgaacacgcacaaagaatcaaattgtcatttcatttcaaatttattattgggtaaatgacagcataggaagaaaaattaacactcatcatgatatgtagctactttggatcattatgcagtattatttcagtagaaaaacacgctatctctctggttatcgtttatgaagatgtagttctgacaagcagttagcaactgatgaggttaataaagtttgcatcgaatggggaatgattaattccgggctagggaggataaaaacatcacttagaatggcctgtgaggtcaacaggtgcacacttctgggactgtgttctttctgtccgtcatgaactctccgtggagtctgttttgaaataggcatttctggtataaagtctgatgaattacattccagctctagagagtgagcagctggaatgtcacattttttgatgtagatttttttttcagtacagagaggattaaattctaaatgtctcagctgttagaggccccttcagacttccaaaaatgaagaacaaaggagtgaactttccctaaagcaattcatcagagctacttggactctctggcatccttctcgagctgctaaggaggagttgccccgagtgattcaagggattgcagctgcttgggatataggggaaagatgtttctagtcttcatcacatggccatatgagagctcacccactagttattatccatcaataatcaacctttgggagctggggagatgggtctattggtaaagtccgtactataagcgtgaacaccggagtttggttcccagaacctaagtaaaagtaaggtggcacagcacgtccccctcataccaggacttcgagagaaggtagagaagacagctgtggagctgtggctagctagcctggtgggatcggtaagctctgcctttagtgagggaccgtgcctcaaacagtatgtggaaagtgatcaggtcgaatgcctcatgtgacctctggctttcatgtgcgtgcacacatacacaatcacacacacacacaaaagaatctaacaactatggctccccaacgttatcttccactatttaagtgtccatttgtaccacgactgtgcggtacctttaacccgagcacacctgaccttagaggaagggtcactttcacgttttgtttgttccgtgcatcatgagacgtttgctgaaccagcctttcacaccatgaagctgacaagtcctctcacgctggttttctccagtctaatgggtggctggctgttttatcttaaagttctgactgcttcggcttcagcagaagcctgtgagacttaactcccgagtgtggactcactcaacatggtgatgatcgcatatcaaatgcagaatggactgttttatcacctgcttagcatcatctactgcttgtggtctactcagtagcctccttatcaagtttctgatgaaactgtggcccatccaattgctcttccctctggctgtcatacccttccatcttaccgctgctcagtctccctcctctgtgaggacctggtttgaacgtcctcagctcagacaggcatgaccacaatggcccctcctataaccagcacacctctgtttctctgggctcctcactccctcgtgcagcctcccataaccctctttgacacttggtatttccttatcctctctccttgccagatgcattgtcgtgactccttggagcctgttctgcctgattgattttattttctttcccagtctttttcctagtctatgtggggtatggagtccgaggtgtgactatattcatgtgggccgtgtgtattggtgttcacttcacttcctcataccctgtaggtcttctgaagacacacatacatgcttgctgcatggagctctgtgtgtgctggagtgcctaagccctgatcttcactgtggccatagtatggtagaaatgaatgctagagaatatacatttgggtcaggtcttgttcttgctttgcagagcttaaagttacaccttctctggtgagttttaggatgctttgtgtcagcactgtgagttactttcctgccgaacagtagtcgggatgcgttagcccgagagggaaagagcctggttgtcacaatatgacagaagtggagctggaggtctgaggcgtggaaagaatgcccatgacgcgtgtgaatgcagttctggggacagcagttctggggacagcacagaggggacgaatctgcttcccacccagtcacccacccactctttgttcagcctagctttcctttgatggtcccaggagacagacacggattcaaggggcagaggcttttgccgctgtgacttcatcgtgttttgaagtttctctcggaaatgattgatttatttttgtctcttgtatgcattatatatgcgttgctgttgcgagtgatagattccaaagggccctgtatgcctttgtccacagacacccagccatgcaagttcagcaactaagagaagcagagtgtctcgctgggttcagaagtagaccagaagggaagcgcatctgggtctcctccatagcagctgctggtttggatggtgaccgggaaagagcagtgctcttacctgtttatgtagtgggtgactgctctcttcgcttttatttagccattcttctggttcctgcccctttaacgttgtaagatccatcacctcatttacgcagttaccttgacacgttgcaggcttgtggacatcatgattccacagcagagcaaattaaaacgtttcttcatgattagaaggttaaatgaggtaaggctgtggtggttagtggggagataaggggttctgaggaggcagagctcaggggactctctggtgattagaaaattaggctggctagacggaggaatgtgggttttacaaattgcagacgctgagcaggaatgaagacttgaggaagtgctggtgacatctgggtgctggctccatggcctgagctggaattgtggcccaggacatcaagcagcagcgttgttagcagcattgttttgaggtttctcttcttccttgagaaattctggatctaattacaccaggaagcagtggtcccaaaccctgccatgatgagagtggaagcctctccttagaagcttcggttttccttaagcttgaaggtggctcggaggtcaagccccgtttccagctggcaggagcctttctctgtgttagtaccttgccagtcacggctgctgtttgtgaggtctgactgcagttcccgtctctgttcctactccagccttgattttctaactccatgactgctgaactttctggtccctggaaagtgagcacctgggaagccaagggctttatcacctgactcccttggatagattctgtgaccctgctgtcttccccaagattccctctaacgtcgcagctgtctaggttcaagttcaactctgagtgttgtgtttaccattaatgttctgcctaatagactccgggcccttccatctaaattgaggctcctcacctactacttgtctccactgcttgctccacttccgtcctttgtttgcaagacctctatctgtaccaagtggactcctactcgtgtttaactgccttacttcgtctgctccagagtaccctcaattctgagcctccatgacggtatagccttcacccttagaaagaccgaacaagtgaacaacaatgcagagtctgctttggctctctgctgtctcctggactcagagtgcacatcttaccctggtactcatggtggctcattgtagttatcacttatgcttatagctttccttctgtgttctgcacggtaagagagactgattggttcctaagaacaagccatgttttcttgttcctcccatctacaaagatctgctcacatgtctctaccaatccaaacgtgtgttttatcaagctcggtctcaagtattgtatccgcaccctttctcaccccagacagatgcaggagcgccagcacaacacccaggggacatgctcttaggcgatttgctgtgctgtctttccctcttctggggcttaaaatttctaatttacattgtgaagttttctgtggctagaaaccactaaatacagactcagaagtgtgaggtgggaatgaagctgggtcagccaggatgtgatggagttatgaatttctctcaactgtttgctgcgtgcctgtgtgactgaaggtgtcatactatgcagaaggcatggatacgaagagtcatgtgacaaggcacatcctagagcttcaggaactgggaagcatgtgagagaaaaggaattgctgtaattatgctctgaggaaagtgcagcaacaatgcctttaaagcagagagggaggagggtgggactttatctctgctggggctggcaggtcgctggtgaaaggctggtgatagggcaggatctggggggttaggaaaggtggcctctggatggaaatgtctgagttgaggttttcaactgaacaggagcatgcaaaggtaaggaagaggaaggctagaagagtatacgaactctctgcctgctccctgccactggcacagaaaggccacccgcttgacaaatgacttttttccccctgctcgggctgaaatatcctaaaagggagaatcctttgattcttctgagagagaaagagaggggtgccccgcccctggtgcgcgagctggaggtcattcactctccttgcctttcttctccactgttttgcagaggaagcccgtgcttgtggtgagcttcatagccctgtgcatcttgctgctagccatgcgccttgtcaatgatgcgactttccctttgctcctgaactgctttggacagcctaagaccaaatggatccctttgccctacacattcaggcagcctcttcgaactcactatggatacataaatgtgaggacccaagaggtaagacctgagagggttacctaggagggtaaccatggcaactgttttccagtaggagcaagatggcttctgagtcatcacatgtacctgttctgtaccaatgagaatttttttgggtccctgacaacattttctgttttcttattcttagatacttctgacacatgtctgaaatctttcactccctctcacatcaaaccgccaaatccctggcttcctatggagctggggaagcaattacctgttttcctggtggtttgaagcttcacatgcatagctttccatttagatgctctgatcagtggccaccggttggagaactggctggctttatttcctgtaggtcacctagttggggacagctctttatagaacccgagaaaagcatttgtctctttataactctgtaatccttagacctgcagcaaaaaaaaaaaaaaaaaaaaaaaaaaaaaaaaaaagccaagctgaattttaacattggcagtggctgcagagataatgggatttaacacctttctacatttaaaagggttaaaaccatttaaacccttcaatctctgaacttttaaatcttcatagccaattggtgtcccaagagagagaaagtagttgaatattggcagctaggaagagtaccttaggctagaagtgtgtgcttgtgtgtgtgagtgcatgtgtgtacgcatgtgtatatatatatacatgtgtgtatgcatatgtgtgtttgtatggatgtgtatgcatgtttgtgtgtgcatgcgtgtgtttgtgtgtgtgtgtgtgtatgtatgtgtgtgcatgtggaagccaggagacaaccttggtcagttttaggatgagatccgaaggcgctgtccactttttatattgttttgagtttgagatgagttgtctcattggtatagacttcaccaagtatggcaggctggctgactagggagttccagaatccaatccagctcttcctgcctccccaaagctcgggtcccaagtatgtgccaccaagccaggctttttgcttgcttgcttgtttgtttgagaattttatacatgtcaatatgttttgatcacatccactccaacttgatgtatccttttaaaaactcactgagtactgttggcttgatcatacagtactcatacctctgtgttttcttgtgtaaagtggccctattacattcagaaagcactgttcacggatgtccatctgacgttttttttttagtgtgaattcttgggaattacaccttagatgctcatgctcagttggaaagtatttactgactaagccaaattccccatctctgtcttcagagttttaccagcaaacatctctctcagaaagtacagtagggggaaaatccctcaaaaacatagcgaagcactcagagggagtgagactgtgtgcacagacatttccatgtgatggggtgagtatgagacacaccagtgttggtgcaaagtccaaggctgtttagagttgttggtgacaaaggtacactgtatcatgccacacaggaggatttggtaacagtaccctggtggagaactattctgtaaatagtggagaggggcggtgtcacacagctcctttgtggccagtggcatgcatgagaagttggtttctctgcacttcactctgtatttttgtatctcctggatttatagactgtttattaaacctttatggttaagggaggcaccattaataatatataaattcctcagagtctttcttggtgtgtatcctctaattggttttaaattaacttttggaagtctgttgcttgaatttgttgagtgtcctgataaattgattacctgtattaaaatgtgtcttttagagaagagcttgcctccctcctgtctctcctcacttttatgtctagctgtcacttaatattctataactctgcagtatgggttaatcatttcacaagtgcctgtcacaggctgaagatggaacacgtggataaagtatttcgtgaatttacactcacgagaaacatgccagtagatagtaaaaccccttgatttctctaaatatttgtggatcaaattttggagtagtccagccacttcctcctgttgatatagtttccttcctacctttgctctcatgatgcactgtgcccccttaaaccatgagtcaaaataaatcctttgtctcttaaatttcatattttcagttatttggtaacagctttgagaaaaagtaactaaaacagtcctggtgtcatgtaaagctacaattaaataagttattatgctttatttagggtagcctgtacattgatgtgggtgtcagtcagactctttatgagggggcagcaaagaggactgcttccctttctgcaccttcacagggtctcaagatgttcattccgctccctctctcagttctctgactttggtccctgaagaccttgtcatcctctcctgtactcaacgcactcattgacggcaggactctgcagaggccatcatttagaaggaaccggtgtgcagctgtctccgtgtgagtgtggatctcacaagggcataggtaatgtcttgaggtcagagacgggcagaggaggatgaaagctactgcattctgacgccctcccagctcttttccaaccagggtaaactgaagctcctgttgttgagtgcaagggggtcttggaggtgagatgagtcccagtaactcgaagaaggctgagttctgaagtccctgctgctcaatgagcatgcagttcttgccagcactgtgatggcgttggctgctcccactctgagggagcaccaggctgcagaagggactggaatgatgtggatgttgcagctgtgtcccctgtatcccatagatggctcataacttctcaggctcctctaccatctcatcatcgctatccacagtgctacctcactgatagaagggtttatagtccactattgagacaggacaggaactcaagcaagacctgaagcagcaaccactgcttactggtttgctttccagcttgctctgcctgccttctttacagctcagccaggctctgccctccctaggatggctgctgcctacactcttcctaccagtcaccaatcagcagtctttcacagatattgccacaggacaatctgacctgggccatttttgaatcgaggttccctgtttccaggtagttgtgtcaggttgacaatagaaactaaccagcattatcgacttcttaccaacccgacacacgcacttaacattgcccaaacataaccttctccttttggtttgtccccaagatatcctggtaatatcatactgtatcatattaaatacaatagaacttcaagcatcccatagtattttaaaaattctaattcaagactaaatggaaagagctgctctatgatatttggtcagagtgttatcaattgacattgaacgtgattttaaaaagcatgtcacccgtgggtgctttaaaatctcacgcacatgtttaaggggtggagcaagcaaccagttgacagggagcaaacataatgaagtagaaaggagggacactgagttaagggtatttaacagtgacgaagggagggagcttttccctgctggatgtctgcggagtagggaggtcacctgggtgcatagcatctggctcttgaatcttcatttggttatttgaacatctgggattttgttttaaaaataactagatagggcaagggtcaaggatcttgatagatcaggatttggctcagcttatccttgctctttctgtagagatcatggtaaatgagggggaaagagacgttctctgtggctggattctgatctagtttcctgccatagggtaagtcactatggtgggctttttttcatgtagtgtgacatggtaggaagccattccctggggaaagccacctatatagacctttcacattggctgcttaagaagcaagcactgatgaccacgggaggcggtagcatggcatttctggttaccagcttcatggcagacatcttccccagaggtgataagagaaccagaatgtggtagagttgggaggaaggctggggaagggaagactgccctttcccatgatgctcagggagaagtccagacatcagaatgcagcagccaaggacaggactgtgctttcagactcttactgacttaacgaggcagaagtgcctctctttaatcacagagactcttagcctcaagtagacaaaatatgaatactttgtatcagttcctgtgacagacaggccctgctggtctagttagagatgcacataacatattgatggtgcaatagaatttcctaaattgtggttattgtaacaattaaggaacaaagctgactttcttggcaataaaagaacatgctcaccacattcaaataaatgtgtgcttgtaactaaggcaggcgggaatgggtgttttatgcttgggtatatacgctttagattttacataagtatatggagagcaattatatgcaaatgtattctctcaaaactttaaactgatcaacttaattgttagttaaaatttgaggactcccatttgtgtaatggtaaataacaagtaatttcggctcttaagttgctttacagaaagaaacaaattaatgcatactaaagattacttatttgacacatacacattagatttgccgttttaaacattatcatttttccaatggctcgagggcttgtatttgttcagtgcaagaagtatgattttatttcttacacaggttgtgagatagcaacgctcaggaaaaaaaacacatttcaagacaatacataactaaatgcaatccagagggttgacatctctgagggttgagataactccagggcaattttgtggcatatgagacaggtaccatgatgcttagttttaattgttaacttgacagaatctggaatcacccatgaagacagtctccttgagggactatgaagattgtgctgatgggcggccacacctgttttcctgttggggttcactcagatgggaaaacctgatgtccacaccgaagatggacagcaacatttcattggctgggccctggacttgatgtataaattcatcctttctctggccttgactgagcatgcactgtgaatattaggctgcatatatgcctcgactctggggtgcccaaacactgctcaggggcgcagaacacagtccatgatagggagcccttgcctgttttttttccccgatgagaaccagctggctctggggtggctgctgtggttccgtctcctgtgtacccagggaattgagggggattgggaacgggtctgttggtctgcgcttttcctaagtgtcaggcaggaagtggacaggggtcaagcccagtgaccacacagctgtcacttttattcatgctctgttctgtgaccttaacatggaaaaagcaccctatgccaaggggtccagaaaggatgcataatcctatcattttccagagatggaaattaaattcacactgggtaacactgggccagtttggctggagtcagttataatctgcatagttatggagatatagactctagctatgcagttacacagactatggaagatgaagatgggaattatgacctagggtgtgaatgagatccttggaaagggaaaggtcacatctatactaacaagcagtagtacatatatacagagaatatgaatatgtgtgtgcgtgtgtgtatccatactcactaaccgcatgcatatctgcaatacattcatgaacctgcacttacggagtgatttccactttcctaaataaaaacacgtgttgtatgggctcatacacactacttgatggttaaatcatgtaagttagcctgttgggtataggtagtgcctcctgtgcctacctacctattacttctctgttatggtcagctcttgcctgctgaccagagagctgaccattaattcagatgactgattggaaaatgaagccattggcccaaggctcaagaagaaccattctgagccatttacagattttcattgtatttttctttgtaacactgttgaccagagctgtattttcttggggtggtagaatatttggaatatgagtctctggaaatcttatcatatccccagagagagtgagaccgaaactctgagagcagcagaaatatgtggtagaagaaccttgaagcctgagatgaaattctaggtccagagcacagccaagcaggaagccagcctccccagtcctgtgacttatgtacagaaaccaataaacgttgttttctactttggctctttttgttgttggcaggcaagaggtgtagcaatcccttgttgttttctaactaccccagaaccctgtagctcatgtttgaataagttgccccctggaggaggacagcagccatctttcaaagtctgaactctcaaacctgttgggaggccgagcatcagaagtcagtcagctgggtggcctcaggatgtgcactgcggcctctgtgcctaggggcatgttgcttccttgacacaatgatcctggagggaagagaataaagactgcagagccagacagcatctggacaagcctgaccacttactgcctctctggccatacatacccagctgataaatcatgcagtcataatataattagcaggtaaaatggtctgtattgctgaggcaacagaaacccctagagattgatgctcactttacatatcgcatctgttatggatgaaagatccattagtaccgtggtttttaatatagtaattgtttctctgggaagatagaagggaattttattcattactgatctttaggtagagaaatgctcatttgccaactgtcatgttaccatgcttgaaaggcacctattagaaattcaaatatcgtatttcatatttcttcatttgtggcaaacaaaggaaaacaaaactgttcacccatcacggataccttgattggaggatggaaaatgtgactgacctgggctcctggtggcataaaacttttgttttccttgagttgatcgtctggctaagtagcttatacagaaatcatggatcaaatggcatttaaaggaccacaggtgctagccaacccacacgatttgatgagtgcttcttttattctacccaaatatgccaaaggtcttaacgaagtttggaaggagaaattcaccaaggaagaaactcacattctgggacaacaccatcaagaggttggtgacatccaggctgtaattggtaaaggttggctgagtctcttgccttgcataacataatcattccatagttgttaagaattgtgaacatttacataattgcaattgaacaattgtgtaagtgtctggaagacaatttgtcactacgtagatgacattaaattatgatttctcattttgcagaataatctatgtggaggaaaacatccaattctaaatattttgatgcaaaagtaaccacgcagttcccaagccaagagctgtctgacaaagcttgggaaatgtcacatgggttcaaatgggcttcttcactaatagacagttccccccctcccacagtggccatgatttgagtggtgtcctgaaggctttcaccagagggactcaccactgggaggcgctgtggagctttgggacatggatctcatgaaagccttcaagttcttggggttctgctcttgaaggagattgctagcccaggtgtgctcctccattcctacatccttgtggccatgcagtgtgtagtttgctctgctgaggtggactgttaggggcctgaggtatggcagtgcatcatgacagaacccgcatgtaccagtcttagatgggaagctccaaaataaataattgttttctaaaagttagctaccttaagcattgtattattgtaatatgaagctggtgcaccaattatttaatacatattgacctcaaaggaaaatgaaattatgaattgtgatctggttatacatagtttaaggtaatctgacatccttctgctataagccaggacatgatgaatgaaataaaaacacattagctaatgcccagcagccattgcctgaaggaatggggctcacgggtaccagcagcttagagtggagaggagaggagaaccacaggtgtgtggcttcctggagctgtgtaggatgaagtgaggggactgggaagcatcaacaggacagggcagacagtgaagccctgagatccaccccagtccatacactcacccaatgccggggactgagagtctgcaaacggcacagggacagacagacaaggacagacagataggcgtgtttcttcaacatttgcattttggataagaattatctgtgaggattcaatgctctaggccctggtggtctccaagttggaacttgactatgtccatttttctagcaccccagaaaactgagaaaccaacccagatctggcccctggccagagataaactgaggccaaggacattgaaaagtccggtggcctggacacaagggcccctctgccgcgccgtccagactcaggcatgcacgagagcagtgctgcttcagcctcgtgtgctggagagctgctgtcgtctgatcccagagtttccccgcccggctgtgggtttccataattcactaggtggttgctctggtgccttcttcaaagctgatcaattctgaattctagaatgcacctggtgacagaaataaataatccagacctgtgcccaaactctaaactgaaaaagaatgaatccaagtttgggaagcaagagtctagtagggaaaaaatatatatgtatatgtgtacacacacacacacacacacacacacacacacacacacacagaaatggcatgaatgtacttataaacaaacaccactgtcacagtcaatgacagtgtctgtgtccagaagtccatagtgaggacagactcttactgatttagctaattttccaaggctcaaggtcaccttggtgaccctgtgtggacaaaggaagtgactgagtttttactggtcagccttttccgggaaacctcagttcatgaagtgcctaagttcatggtcatggctggatgtcctatgtgcaaagtcctgggtttgtaaagaataaaatactccctctccccaaagctgataaccatttatataatgctatcacataataggtgatagagtaacgtaatatgtggagggttatttcaacttttcaaattcagtcctagatttttgggacagtacctaagaatattaactgtggcattttaagtctctgttctaaatctggtgtgatatttttttcataaacatttaaaaattttttccagagaaaatatttaaagcaatatctatgcatgaaaacactcttggaggtatttctaacatcagaactgtagtctgtctagacaaatatattattcataataccttaaagtgagtattttcgagctctttctaatgatctccttccaaaaaatatggaaagtagaaaagtataagttacagtttgcacctgagaaataccacatgaactatgtgacttgagttaacgtcaaggtgacaaatgatgccagtaggaagttaccttgggcagattttgtagtgacagctctttacctcgggccattttctcctgactaatcatgagacaaacacgagagaaatccaaatgaggggcattcacaaaacacatagccactaccttccaaagacttagactcatcaggaacaggagagtctctgtcaacctgctgggaccaggagggtcctaaagaagtgcagtcaaattcagcacacatcctgactgggctcccggaaccaaaacagtaggtcaggactaagtacactggaatcttgcccttccgccgaaatcaagactgtaacagttattcagtgcagaatcatcactgtgacgaatgttttctatagatactgcctgagaagctggggcaggggcttttgttaagtctctgcagtcttttcaagcgtcaatcaaaaattgctcaaaccggcttagatggtgtgtgtgttgtctgtgtgcatgcatgtgtgtatatgtacaagagtgtgtgtgtgtacaagtgtgtgtgagagagagagtgtgtgtgtgtgtgttctccttaccccttcaccagctgctgggtccacacttggctatcacagtgaggcagtgaagttggatgaagtcccctgtggtaggctgacttagaatcctttgggcatagactcaggaatgactctgtttgtgttctggccagccatccttgtggattcctctcttcccccacattgccattgttttcttggtgctcgctgggtaagcctggaccttactgcagttttgatttgcattgccatgatagacagggatattactctttatacacttattggccatttgtattccatttttattcttgtaacttaatgcatgtataccatgtttttagattatatccaaaaatatatataccacgtgcctccttcaaaatctttctgaactcctacatgtgcccactaattggtgtttaacttctggagttctttgttgagtctccatatgaattcggtatttggtatacgattggtaacaactcttcctcgtcctgtgtccggtgcccttacctcgctgtctttcccatggcggtgcaaagcttttcctttcatacagtgccctttgtcaacgtctactctcagtttttgagctatgtgggtcctttccagaaaatcgttgcctatgctgtctctttcctctgcccctttcaactctcgggctttacatttaggtctttggttcagtttggactggttgtcaaaccctgtgaaagatagggacctgcatctgttcttgaacatatgggcatccgttttcccaaccccatcttctttttctttagtgcatgtgtttagcatcgtactaaaagcgtgttagcagccctggggatgtacctctaggtcctctgcctgattctgattcctccggtgtctgtctgtgtgtgagccagcagcgtgctggtttgggcctcctgcattgctttttctgttcaggattgcttggagtctttggggtcttaggaaattgagggctgcttttgcaattctacgaggaatgccatggcggtcgaggatgcacaccaagtctgcacattgctttaggcaccgtagctgttttcacaattatcaattcaaatctacaggtgggaggacctgctgctgtcttccagtgtcttctttctcttctctctccagtgctccgaagttttcattgtagacatctttttacggccttggtgagacttttttcacagggttttgtttggtaggttttagttttatagatgagctttttacacccacactgtcttaggagacaggtactgggacatgggaaagctatgttcgtcacatgttggtcctgcattctcagtttttcggaaaatgtttattataatggggatatttctaatcgagtctgtagggatgttaaagcttaggttcatgtcacctgcaaagataattttactcatttcctgtttgctccagtttcattgttcttttctctaattgtaagctctgtgttgaaggacggtggagtgacaggaagctcttggctcctgcctggttctgcaggaatcactgtctgtttagtttgatgttggctaaacgttggctggttggagatgcctttactatgctgaggtgtttttccgtgtttcttgtattcttactttctacctggagtttatcatgaactcatgctggcctctgtcaagggctttgggggtcatgtgatttctgtttctgaacctatgtatgtgctaccttgcatgtgttgatctgcctacacaagacttgcatcctgtaatgaaaccattttagtcatggttaagacattttaaaatgttgctaaacttcgttggcaagtattttatttagatggtttgtatcagagtgatactatacctatagaatgagtttggcagtgtgttagtttcctttatcacagcacattgccatggtatagtacttagacaaaaccagcgtgtggagaagtgcctcctttgagcctacacttgaaggcctaatacactatggtgggggacagcttcaggctgttgttttcacgtgaccgcagtcagaggagagagggcctacatcagcacttagcccgctttcactgttttacagagcccaggaagtgggcctgcccacaattaaaatggatcttccgacactaattaatgtaatcaagataatccctcacaagcaggtgcagaagcccacatcccacaagagtctatatcttgttaacgattaaaactaacagttgcaggcagcggccttcctttcggattttggggaataattcaaagccccggtgtatttctttaaagatctggtagactcttcagggaatctatccagctctggggttttctttgttagaagaatttcaccatttcagtgttgtcacttacagagacgtgcttaagctgatatcctcctggtttaatttccattgcttataggtacctaggaactaatctcttctactttctcatcgtttttagagtctccctcatggtcctctagattctgtttctgttgcagtgcccaaactccatcattaattttaataaattgggtcatttccttcttttgttagcttggttatgagtttatggctttgtttatctattcaaagaacaagatctctgtttcattgattccttgtattgttattttagtctccattttattcatttcttctaccatccttattatttatttctacctaataatttggctttttcttatttttataaaaatctggaaattttcataaaattatatatttgaagtctgtctttttttttttcccagaaacactcaaatctatgaactcagcattttttttgtgtgtgtcccagtggttctgataaagttgtggtctcattttcatttgattctagaacttttaaggatattcttggctcactctccagtgacccactaactatttaagtgggtattattcaatctccaagcatgtttttatagtattccttgctgctcacatctacatttattctaccaagagctgagaaactacaagaaattatcttgattactttctgtatttgttaaggtttcctttatgctctaaaacttgatttgttttacagaaatgttcatgggcagcttagaaaaaaatgtatgtggccgttggatcactagtctatagagatctgttaagtctacctgatctgtcatacagtttaatgttgaagtttctatgtcagattttttctatataatttattgatgagagttagatattgaagtcttctactattattgcatataaacttaattttcatattttatttaatagtatcattttattaaattagatacttcagccttttatgcatgtcttcttaaatcactgtgtcttgttatatagatttggaactttggactgtttaggtatacaatcccagtttccaaaagttgtctttttccttctcatttttcaacatttgttatgttgacaagagattcctaagcattagtgatcaggagacagttttacagagagtccttctgacgtttggtcattctgtgtgaagctgactttgttatatttgctattttaagaaactattttaaaaattattcttctaaagtcatagctgtatgcattaaattttatttaacgtatttgattctcctctcagaacttataaaggcattacttctttatttttctaattatagtttttcattttcatacaaccattcaggatgctacagaaaaatataaccaacaagatgtgtagtcaaattatgtatgtatgtcatgtacatgtaaatagatatgcacatacatataatttgagatcacatgtatacactgaaatcatgtaggagtaatggttagtttttgatggggtagaccagcaagacagaggcctgctgaactttctgttttgaaatcaatgtctactggactttcttcttgctaagagaactcagtctttgttctcttgggcttcaaattgactggatacaggcagtcaacagtatatagagtgtggtctaatttactcaaagcctatcaatttaatactaattttatctaaaaaccatatgaacaaaagctaaagaacatccagaatagcatttggccaaaaccctcgcactgtgatttactcaaactaacccctgagatgaattgtcacagcccacagttcttacattgagtcatgggatttgaatgtccattgcacattctccttggtttatataaagtcacaatttcatttgtaaatgagaaaataggctacactagacaattctcaagtcacatgttcaaagtgtcaggggtgagttttgaacctgcctccagagcatcagttaaggctgggtggaagatagagaggtggggaggaggtaggagagagcttacaaaggctagcaccttagtctgaagtctggatgttttttaactaagggttcagctgcctgtcactcttccctgtgggtctgtcttacttgcttgtgttgaacttctgagccccgtggatcttatatgcaggagtgcattttgtggtgccattaggagctatggtgaagaccatagctgggtcaactatgcaactctccctctgtcctttcatagtccggcagaaatcacagctaccacgccattcctgccctgctgctgatgaactgacctcctgtgtctctccctatagttttcaaaaccaatggtgctatttttcgttatttaagttctgtttaaaaagcagggtgattgttaactgtgttcttttccaggttgtaccaacgcattggccccgaattccctgaattatttgtcagatgggacagcattttagagtgaaaatatcagttttcctaaattagagagttggtaggaaatggcagtccggcttcttgattttaaactaggttgagattgatatcctttggcaggaatctactgaggatcaaagtgaagcagattcttaggtgataagctctgagccaaagggccctaatgcttactattgaaggcctggtacctcagaggggcaagtctgtgcatctttgatattcctgggagccaaacgaacaccagctggcttgactgccttcagtaccccacaactttcttgttttccagcgattggactgtggccaatctgctgtccaaaccagggtgaaccttccaattctccttttcattaaataaggtgctctgagcctgttgttgctctccccggttagagtccagggatggagtcgcctgacagtggctgctgtgcttgtataaagtgctgtggcctttacaggcaggcagacttcacagcatcagtaatatccaccatcggatctgccttagcatattcctgccactgggaagcatttatttctttcattctttctttatttttttgcttgtagcatggaagaaagcatcttaaattctgtaggctacataattgtgcccacgagccttctcttgcaatgtgtcctgcccccataaccgtttttctctgtaagtgaagttaactatgcagaaagccaattaggagaattcgcttaggattctttccctaactgtctcttacagtgcatttggcattactgccagacaaagatgttcaaaatatagcaaaatggtctgtatcggcccttctactttctaccttcatgtgttagttgcaaataccagttttctatatgtaaagatggcaccagggatttgtttgatttgcctccttagcagtggtgggaaatatttgcacactttttataataattaatgattatccacagatatttgtttatttttggtaggtttgtataaacagtataacgtttactgaataattctgctgtctatggcatccaccattttcagtagagaacagccaataaatgaagcacaaagaaactaagtagctcactgatgtcacagagctgccttctgttgctcattccagatagacctcctcttcaccaggctggctttgttgttctcagatgatcataatcttagcggcagcttcctgagtgcctctctgtgccaagtgctctgctaagtgcctcaagtggaatgaaagtcatagccagcactttcttgccagtggatcaatcttatttacaaatgagtaagcacagggtcaaaaaattaagtaacttactcaaggttgggtaacagcatgagggttctgggaagtgtgacttttttttttccatatttcaaatctagtatctagttgaaaatgaaatcttgagaaattgtctggctgacagaggccatctttcagctaccagtgataggggaagattaactccatctccagcactgcagaccatgatggcttgcatcctgttggcagtgtctaatagacatccaagatcctagtgcaaagaaaatgtagctgttagattcccaatcctccatatatgatgggaaaatgtagctgttagagtccctgccctccaattcatgatggggcagaagctgacaggggaaacttcctgccaaccagtgattctcaaatggctggtaatcctgagagagaagctggcattttgaatgagacccttgtgaacctgaccgttgaatgttccgactgaggtgtgctgtgtgtgtgtggggggggggggaggcaggggatgaacagccatacagcttcctctcttgaaggattacttgttcatgaattctgggaagaagactgaaaatggagtgggtttttgcccccctggtgatgagctgtttctgctatggaatattgatgagaaattcatcaggcagacagatgcccagagagccatttccagatgtgttcctgtttatagtcactctgtggacatgcaatcatccaatgcctccctcatcaaggcgctatgtagtgagcacgggagcttttgcctttgtttctgtctctacaacaacctgtttgagttccttttaaaccatgacaactatttcctacgttctccgcagtgtcccacttgcatgctggactaggtggtcgttcttcacctttcctggtgaatcattcaatctgttcactgcctgcaggtaacaattctaacatgacaacatttgaatctattagaatcttcatgttttcttcctgttatcttttcaccttcaatggattagagcagccctccctcttaggagctctacactttttcttgtgaaggaatcagggtgtatgggtgacagatagaaatggagaactagccacttattcgcagaataggctggctagtgaagagttaccaccccacttgccattgtagtgtgccttttctgatcactcccctgctttcatggggatgcctgcttagaatatcacatggaattttctcccttaagtgctcgtgcctggagtttcctggaagattgattggaacgcaaggatttcagttcgtggcctcctgttaatcagcttagaattgttaaagtcattagtgctataaatttccttgtagtctcaatttctcttgctcagggttaattcagtttggtgtgggcagaatgccttccaccaagtaagtgtttttaatggagcttttcctggttaatgacaatggggacacccaaagggaactggcacttggttcagagctctgtgggagatgagtgtgctagagtgctctccctgggaatcagccagcagcgggaggccacatagaattcatttctcttccctggagtctcacgattggctcccccactacatctacctttctctctctctctctttttcccccttgtgttctaattctgtaaacagtcttagggatatttagaaaagttgggcaaaagttgcagttgtttgccttgcgttcatccctctgtgttgagactagaggaggttctttgtgtcctctgaagtcaccttctgtggaacagagcccataccacttccctgaatagaagcaagaccaggatgaagcctttccactagggcagggctgatgatgtccctctgggcagaggaggagctggctttcaagtgagagcttgtgttgtgagtcggtccacacatagtccctgagacctcacaggctatgcctctgtccacttctccaggcttctctgtctctaaaccttcctgctgcgttgttcaaggcttaaaccatgcagattcactctggattaaacacagagcagcctgccccattcctccactctctgactcagcacactgacactgcttatctctcggtcttttagtaagtgtcctctacctcatgcccctggtgtgcccctgttctgtgctcagcagctaggatggttctaatacttgaccaaaaaaccctctgcccatgcaagatccccgagtttgtgatgggttgattatccctcctcctttctccttcctcccgtctctcattttttnnnnnnnnnnnnnnnnnnnnnnnnnnnnnnnnnnnnnnnnnnnnnnnnnnnnnnnnnnnnnnnnnnnnnnnnnnnnnnnnnnnnnnnnnnnnnnnnnnnnnnnnnnnnnnnnnnnnnnnnnnnnnnnnnnnnnnnnnnnnnnnnnnnnnnnnnnnnnnnnnnnnnnnnnnnnnnnnnnnnnnnnnnnnnnnnnnnnnnnnnnnnnnnnnnnnnnnnnnnnnnnnnnnnnnnnnnnnnnnnnnnnnnnnnnnnnnnnnnnnnnnnnnnnnnnnnnnnnnnnnnnnnnnnnnnnnnnnnnnnnnnnnnnnnnnnnnnnnnnnnnnnnnnnnnnnnnnnnnnnnnnnnnnnnnnnnnnnnnnnnnnnnnnnnnnnnnnnnnnnnnnnnnnnnnnnnnnnnnnnnnnnnnnnnnnnnnnnnnnnnnnnnnnnnnnnnnnnnnnnnnnnnnnnnnnnnnnnnnnnnnnnnnnnnnnnnnnnnnnnnnnnnnnnnnnnnnnnnnnnnnnnnnnnnnnnnnnnnnnnnnnnnnnnnnnnnnnnnnnnnnnnnnnnnnnnnnnnnnnnnnnnnnnnnnnnnnnnnnnnnnnnnnnnnnnnnnnnnnnnnnnnnnnnnnnnnnnnnnnnnnnnnnnnnnnnnnnnnnnnnnnnnnnnnnnnnnnnnnnnnnnnnnnnnnnnnnnnnnnnnnnnnnnnnnnnnnnnnnnnnnnnnnnnnnnnnnnaggattgtaacactttttcaatggtgttttcaagagacaaacactgcccaacacaatgtagatgctccagaaatatttgtcaaacaaacaagtatgtcttacgattatatatatgtattccagtctgcattggtgtccacacatctccagtcatgttgcaaggagaatgatttattcttaatgaaaaatattaattttattgatccaaaggaggatgtaaaattgttttcctcttgcttgctatttccattttttccaatttgggctagccagccgtgccgcagctgaaccgatcccatggattttaataagggcgcatgcttccaagaaggataataagcaagtatggaggacagggtcacattcccagagcccttctgtcaggaggccaagattaaaatgcgtgaggcagcccagaaggccaggaggaggctgtaatttctcactgtggatttcctcagagtgccattagcttgccaaggggagcgtagggtagattgcattcacacaggggaagcaaggtagagccgggtaataccgaactcttggcatcatttcaattatgcattgcaagaatagaaccttgatcccagacatacttctctgaatcatacagacttgccagacaggtatttccattgctagcgaatgtcctctcatttttctctgtaacggaacctcagtcagcctagaagcctccaattctaaacagtatcttttgttataacccaggcacttgctgtgccatttggctctttgtcatcgatggaatctcagcacattgggaaacttataacgttcatcccctctggactttaaaatgcccccaaataatcattgagctattaagcccattgtgttggtaaggagaatgagtcattaaaaagtagttcaaaataaaaagaactaaggcccaaacatctcagctccctcccttggtaaatactggtatgaggcagtacacacacatatatgagaatggtttcatttatcaatagttattgatgagagcaatatgaagcaagggaaagcagccagaggactgactccaggaccacgcccccctgaggccgagaggccatccaacctccctctcctcccatgggactccacagctgccttcctccactgctctgtgggtgattgaagggagtgcccaggattccagcctacccagggctgccagagaacaggcaacagagactcacttctcatacatacagggacatctgctcatagctggagagctgacaggttcccttgcagagcccagcctagcttccagtcttcagactcagctacctggcttctgtatctctccttcattgttgcttaatccagggctaggcttcggccagctcaggagtgtagagcatcaccctgtcacttgtcactcacgcctgcctgcctggcactctagctgcccggtcagtagccagatgctggcctgggaagccctgggggactctagagtttgagatgctggtctggaaggaggtctttgtgaattgtcttaaggctaagagctaaaaagcaggctctcatgatttatgcccttgagctgtcatcacttggtattggttagaaattcgaacttctggtcctatctaattaaaatctgcattttaacaagaattcccgggaatgtgtgtgtttgagaaaccttggccaaccaatgttaacaagactggcagaatctcagaggcttgagagtcggtggggctttgacccttgtgtgactttgtgtacttgtatgtattaggttcctggggaggcaagagtgtgtggggtgcatgttgcaccatgtgttgcatacgtgtagaggccacagaaagacttgaggtctttttccaggcgctgtccaccatcttgatggctgagatggggtctctccttgccctggacctcacccagttgactggctggttttatgtgtcaacttgacacaagctagagccatcagaaggaaggagccccagctgaggaaatacttccatgagatcaagttttaaggtgttttctcagtgggggagggcccatcccattgtgggtgaaaccatgctggtggtcctgtctgcgttctataagaaagcatgttgagccagccccatgaagcaagccagtaggcaagagcaccccaccgtggcctctgtatcagctcatgcttccatgttcctgccctgtgtgagttcctatcctgcctgacttccttcagtaaggatatattggaatatagcaatatggttgaaggaacagcaatatggaagtaagaaaaaccaactaaaccccttcacttgctgtttggtcatggtgtttcattgcagcaatagaaaccctaagacaccaggtatctaggcggagtggcagtgagcaccagaggtcttcccgtctccgcttccctagcactggggttagacgtgtgcatctccatccctgacttgtttatctgggtgtttgggtcctcatgcttgcacggcaagcactttaccagctgtgttaccccctagttcccttttgtgcactttgcagcctgaggtatttataggctgtgtctttctttcttggcctggaggtagagtgactggcccctctgtcatttccacggggctgtgcaaggtggctcgtgtctggaccatcaaagcagcactgtcagcctttcttcaagtagtggccaagccacatggtcctcagtggaccagctactgacttcattgtgccttacagtcagcaaaaccagtaaccaccctgtgtggagcattaacacaggagtcacacgtgaagctgtggccattaacttgtttatggttggactgctatgcaaagccgagggaaagtatgactcttttaggattaatatattggacagaatgtctaccaggagaggaggcatttgctgataaatagaattctgctgttgatttatttagtaatggagacttgaaattagagaaatcagtgtgcgtgtgaaagccattgtcatctggttaattatgttttgccagcaagatggggaaacactttgtgctcagcgcagccaaatgcttccagccatagtcctgaattgtaaatgacaggcacctaagtggggataaagacaaggctcccggaatgccactttcctggaccgatgttgcctctgaggcttgacatctctgtccactgctgtaacagtgggctttttcggtggtgattttttgttcatgagacatcggtaactactgaaagaccgttgtcataatggtgagagatgaggaatagtaaggagggccaagtgtgatgtggtgactttgacaatgtaatgtcactgtgaagacacaccatgaccacagcaactcttataaagaaaatctttaattgggcctggagtacagttcagagatttagtccattatcctcgtggtgagaagcatggcggcgtgcaggcagacatggtgctggacaaggagctcagagttctatatcttcatccacaggcagcagagagagagagagagagagagagagagagagagagagagagagagagagcgccactgggcctgacttggcttttgaacccttaaagcccacatttcctccaacaagaccacacccactccagcaaggccacactctaccaactcaaatatatacgcttgtaggtgccgtgttcagaccaacacacgtggataccagtgacttctcttctgacaggcaccttcccttcttccagttctgatggaccatcaaggagtttcacagcataatctgtgatctgtctctccaatcacctctgcaggggagggattaagatggcagacagaatagtcctgttcagagactttccagcttgaatccctggaaccagtaaatatgttccctttcatgccaaatgggctatttcagggttggtgatactaagggcctggagaaagaaattttgttcccacttagccaatcatgtctgtgtaagttgaggttagagatgggagagtccaggaggccctgctgccagttttgaagatggacaaatgggtctttagccagtgaactgtggaagtttctagaatccagaaaaggcaagaaaccagatcattcccagccgtgtccagcaaggtacagttagcagatatgccttgaactgctttaagctgtcttgtttgccgcaaatgggaattatacatggaactaagcgtttctcctccttaggctgctcctgtaaagaaagacttgatccagtataaagtcagctcagttactcatcaacaaccatctacgataagcgagtgtctcctgcgtgtctatctgaggcacttggggtagggtgtgagcaacacgggacaggttcctcttctaatccagtgtcaggagattgataactcccagaagacagacactcgtgatccatagagatgcacatggaggctggagccactgcattcagagattctgcacttagggatgggaagggatggagaagccatgcagatagagtgttctcacaagacactgcaggatcacgtgatctcatcagggaggaagcacagggtcagagaacagccaggggtgcttatgttgatgggcaccttgcagtgaacttcaaagcatgacacaaatattagtcactgtggctgtgttccctctgtgcatctgtgagctatgagatcttacttttgtatatgctgaatggggagaaaacagctattgtccaaagattccaagatatgcaagcccaagttgagtattttcttagaatgtatgggtctgtgtgtcacagtgacgggacatcattgtctctgtggtctacgagggatctccacaatacgagtggggttgtgtggcctctttcgtagtaaagagaacattctggggtggtaaagtcaagggcattgagaaagggcacacagctgtgctaggggagaagtcaccaagtgattagacaaccttggcccctgctttgcaggtggaatgggtggggcgggcaggtgcattggttctgcagccttgtaaacaagtagttccctggtggagccaggctctgccagaggaagcagtgaggatatctggagtctaatctgggcgctgtctttctaaggcacaggaggaaacgggcagtttctaattaaggatgctgaagtgctgcccctggtaaggtcacaggtgaagtgtgtctcagctttctctatgctgaagagtctgtgtgcaagcaatacacatttttattcttactaattcaggctatccttttagattatacaccccaaatgagttcctccagattctctgtagttcctgtgataaatgacgcctcagaatgttgcaagcagagcagccttccctctcctgcctagtgacagaagcgaagtgggcatctccagccacgcgccttcctcacacctccctcatggctgctgcctctcagcatggagcatctataaagggaaagtgaagggttgctaagcaggatgggaaactcccaatgtagagatgtgggaaaaaaataaaaagggtcaaatcagtatgtgttatgagttgcacagaagcccgaatcctagaaagctccggaaagtagtccaagccagaaataaccaggcatgcagccaggatggagagcaggaggcagtctttcgatccctgctgtgtgtgccactgtcctgtcctcaaggtcagaaatctctgtcccatttccttccaatccagatctgtagcaaaagcctgtggagtacaaagaggagagacagtccatacgagtgatcctatctcccaagccctttgagagtttttgcattttatttgcttaaaatactgaaagtgtgccagtgccttgaaatagtatggttccctggcattctgccataaaggtgatcatgaaaagtggtttaaggcatctgtgagaattgactttatgaggtacactctctcattcatctaaccatctgtccatctatcatcctttcatctattcctacatccacccattcatccatgcacccacctatccaatccatccatccatccatccatccatccatccatccatccatccgaggtatggtagccactagatgccagacactgagctaggagccaagctaggggacaagacctgtattgagcctcctggaactcgttgatgtaatagaagccagtaaacatgtgagtgaatcacacacaagtggtgaagtgttgtagaggatgctgacatggtgttatggtagagaagcacatacaagttgcagaaaggtctggtttggaatcatgttgcttatggagaagccctccaccatcacgtttctgaatgtgcatttcctgtctcctcccctccctgcctgtatccacatcctttgtgcccgaatcattactctacgccctgagttgttgctgacacctgacacaggttttcatttacttggccatctgccttagtccatttgtgtctctatcatgagatatctgaggatgccagcaaaccgtgacgtttactctgctcaccattctgatggctgtggggtctgatcagcacaatgcagacacctagaatgacatgccagaggaggacaaaggatgtctgctgagggcagaatggccatgcttgtggaacatgtctgcttcacatgaccacaagccttgccccctctgcactccctcctctcttcctaacactctccctgccatggggtggctgtcattctagagcatcttctaacaagcctactgaaagatcacctgattgttagccaatgggatttcatctgccttactctttaccattggttccagtccagagcctgcgaagtttagatgctaccaacatgcagagaaccaagatgcaagtgactgtcgtccagccacaaggaaaggacttctaacaggcatggggttgcttactctagagcattatgctctctggatatgtagcttgaagatcatattcatccacccttcctgtctgtccatttatccatctgctcagctctggcagccttttccgttgtctattaaactaacttaattgtcctattgattcctcttaactgattctagtgtgtctttgacatatgcccctatgcatttgtttaagaataattttaagaatatagatgtgtgtatattttcctatgcccataagtatggagggggagggaggagagaagagagaagtaaaaaacagaacacatttggcttagacttctttaaatgagcttagaatacttaaagtcaccaactgttgtcaaaataatctaactgaaaaccttttttatgatatattattgactctctcatgtaatttatagagtattatgttaaaaagaaatgacaagggccagggagatggcttggtcaggtgcttgtctgtacaatcatgaagacctgcatgtctgtccccagcacctgctcagaaaaccctagaactgactagttcagagagggatagtgtcctggaatgagagagacagacagacagacacagagacagacagagagagacagagagacacaaaaagcacagcaccataaaggacaactcccaacctcgacctctggtctccttgcatacataacccaacacgcccacagtgcctaatggattataatgtgtgcttgagttttatttgagaagccccataatgagattgaaacttagagatctgtaaacattggatttgaatacacgctaccagttgtacaatgagaaaacccccttctcccattggtgctcaaaatctatgctctagaaactcagagagaacttgccatgaagagaattttattcttagagcatcctgccaattaaaatagcccatacagagtacgcttggaaagtggcctccgccatttattttctaagattccacattgacagggataacttattatttagccgtgactggtctggtctagttttattgcctcacgcacttgctgaccctattgatttaccctgaaagtctaatttagtccgggagaccacctgtgatttctgtacatttcacatgcggaagagcatcgttctcagcaacttgttctctctgatttccttcgcacatgagagttgatgtagaaaagacagctgagcagagcctggcagcctttcaaaagcacgcagccaagtctccatttactcactctaatttgaagctctgtatgccgggtgtagccacccctctcccaaaccacgtgagactgagatctcccgagacacagcgaggctgcagaaattgaaattaccttggcgtgatagatttttctaatcttctttctttcctgaaaaccaagaattttgaaactgctggtgccagttttatgcagcccaagcagatgaggatgatgcacatagatggagaggtggtttgagagtgagattgggctctgaggtctcgggagctttgtgtgcagaagtttctgtctagtcaggcttccgtggaatgtgtctgtgttgtgcttcgtgtactaacccatgcctcaaactaacaaagagccttcctctctgttacacaatacttgggtcttctgaaaaatacgctagaccatatggttgatgtgtccatcaaagtagctgctttaaaacagaaatgtcatagtcaaagccaaagatgttttgagcttctctttataaatttttacaaaagaaacaaatgtgcatgtggcagagcgtgcaagagtgaagagcaagtggaggagaagcgctctgttctctcccaataaaacctccagaccttgaatgtctttttaaagaagagaatccagtcttgggcagttacttagatttcattacataagtcagataccactggggggccttgcactggagactaacaagggatctaacctaaatgcgccttggggaagggtagaattcctgtaggatgctcagcaatgtatgtcagtatagtgtatgccagatccactgtgcaaagatggcgagtcagatgcctcagtgacctggggacaacccatttttaagattcctttaatggtgatgtgttttccctatcatgtccctttggcatgtcccacctcccccttgctttctccggggctgctttttgtgtttgagactcttgaagaagtgaaaccccacaggggcggagagtggcccgtcagggtaaagacaacatagaagaccttcagggagatacctgctaatctgggttagtgtctgcagataagggcacatgatgttccctcctgtgcatggagatatgtgcaaggtccacagctgagatctgcagttactgagacctgaagctgaagactttctgaacactgccgtgtgctatgggttttttttcctgcatgtcctgcatcattgctgcatagagcagaggtcctctgtccttccgtgcttggttcaccttgtctccgtagcatttctgctcttgaacattggcagttgtaccgatggaaacctgaagctgacgctataacttcttcagccgttcctgtgatagcatcttggcaatgttaagggagggaggatacattttggataatcatgtttggaagctacagtcagcatgatgcaggcatggtggtggtgaggacagctccagctgtgggggcaggaccgtgaggcagctggtcacatggcatccagagtcaggaagcagagagattaactggcttcctcttttccttttgatccaggctttgactcagcataaggaatgataccactcacatttagggcgagtcttccatgtcccaataggcctctctaaaagcaccctcaaagacagtctcagaggtgtgtctcctgggtgactgtaaatccagtcaaactgataatgaagattagccattatataccataataccttgacagttggcctgctgggtgactgacaagagggtagcaaatataacacagacagaaaaataactttatgactcagatccttggaggggccaggccagataaggtgagatttctctacattatgtagaactgtacaccatttaggaaaggagaactgtttatggtgctcacagtttaatgattttatacacatttggatggaggtaacagtgggtgccaaagggggactgtttctgtgttttcatgttctttggtttaattgattttcgatgttgttgatgcccctgtgtaaaaagaagaggcctgggctcataatctgacctttcttttccttctcaaaaccacatgattgcatcacagcttggacgtttctgcagttttgagttgtaggttttagtgataaacttagctgccagtctctggtccctcactctgagcagctcttctccatcctcagctcaggaccttccctttctgccctctcacctttgaggctgctaatgtcctaacctagaatcatacttaatgtttatatataagcgttatatagagcatgattacagaaactgaaaaatggcaaactggattgatgcagttttgatctggtaggatttgaatgtgaactaaatagtatacaggagtgtttaattttaaagattgtattttattttcattcatgtgtatacgttagtatgtgtacttgtgagagatggtgcccctagggttcagaagaaggcatcagacccctggggctggagttacaggtggttgtggatgctgggaactgaacttgtatcctctgtagaaagcacttctaactgttgagtgtcactctagctccatagaaatgttttattcttaaattttctgtttgtggtacatattatgaaagatcatgggttctgcaatgtattttgaaatactttaacacatacgcgtgtatagaattgctaagtgatagactatataaaaatgttaaatgttatattacactagtgagtgtagggatagggatacaatatatatcttcttatccatttcatctggtactggcttaaagtttttcaagataaaaactaacaataataaaaaggccatgcctgtgattccagcatgtgagaggtggaggcagagagattggaatttgaagatcatcctgggctttgtaatgagttccaaaccagcccggtttacaaagatcctacctcaaaatcaaagcagaaataaaaagtgaaacagaacaaaaacaaacaaaacaccgagggaaaaacccaactcacttcgaaagctacatttttaaaacaagattaaaatagtggctcatgcttatagctcccttgcaagatttattaagtactgggttcaaaagatatatttaagccttcattgttttaaagttacaactaaaactggataagatcgtgagtaaggacgttggaagtgctctctgagtgacgtgtctgaaagcagtcgctgacacagatgtcttcagctctagaagagtggcctatctaactagaatcatcaaaattggctatggcgccttggctatggcgccttgctcctgccaggaatctcaacacttggaggatgaggaagcaggaccaggagctgtaggatagactgggctacagagtgagatgccggcgcagaactgaattgtcaataagatggctaaatttgaattctgtcttagatttataacaaaataggcaagaaaaaaaatatgcttttgtttcttactacccattgattgatcaactatagacattacttatctgtacctctatattaaaatcaattataggcattgtttgttgatgcctctctattagaaggggatccagcccatcttttaaaaaaaacattgtattgattttttgagaatttcacatcatgcaccctagtccccctcctatctgccctgcacccttgcaacctctgctcccaaagaaaatacaaaacaaaaataaacaaaataaaaactttaaaaaaaaatctcatcatggaagcggtagtgtgttacagtgtgtcccatagtacacccatttgttcacacttctttacgtgtaaatgttcattgcagtgagtcattggtctggctcaaggcctctggcttctgctacaggacaatgactggattctcacaggacttttttcagacatcctgttgttgtcctgtgtcatggagatcctgcaacttaggactggctgcagcagttcatagatgggatagatgttggggtgggctaactcaaagccctggatctgggcctgggtgtagctgagttgatcaaccttctagctctctcctgtgcccataccaccagggccagttctactgtgctgtctgggcaaagtgtcgggtaccacccccccccccaagtcctgcagccagtgatgggcaagaccagctcttcctctctcacgacaccagggacagatctcctgcctgccatgggcgaccagcagcaaggtctggaggaagggtctctctccctcacccataccacctcacggcaggtgagtggtggggccaccagctcatctttttattattccaactctaatgtgggttaaacttatgaacatgtattaacatcattgttttgtcttatgtaaaacataaaatttagtgttttcacagtctaagtatgggtgaggctgacatgaagcaaatactcgcaagtgttatggggctaataactgaacttgctgttttcaacatcttgggttcccaacacatttgtcactttgataatgtggaggatttacagcactgtattctcctgtcactcgctcgaggctcagtgatgaaggacagtactaagccaggcaccaaagttgagcgtagcacatggagagacaggccatttctgtcccacatctcaggactcagcaggttccctgcagtcagtctcagggatgtgcacatctggattgctgtgtgagcgcggctatggtgctgtgcgtggaaggcttttcatgagcagcatcccgctttcgctagtctgatacacttggttgagcatcttccttttcttcgtcttgaaaaaaatgaatcgcgatgttgtatagctattagaatttttgttgtttgtttcctttggtttgtcttttcttttgatgatagacaatacctcttgaaggaaacatgttgatttgatttccttttagagatatttcattgatcccatttttagtttcttttgtggttttcatactactatggtttccaagcttaaaaatactcgggaagataatcttcgaatctagattgtcttcatatcaagtgtctcatgttctatatggcacatttaatcccactgtgcttaggtttttatatgtgtttctaactttgatttgctttgctttgttttactttctttgtcagatagacatctttccctgttcccagtttgacacgattttttgcaaatgcagtatcagatttatgtgtccaggagagtccggtgtggacaatcttatccttaacgtctttatttcttttcagagttcgggatgagtagaaaaaccatagatcccggtctgcctgggacctgctgttgtcttgctaaagaatacatcagctgaaaaataaattagatgaccactctaatgatgagcaagccatgtaattttatctaaatgcagcgacagcatacaattataatgcatgaattctcaaccgtgggaatgtcatatccagagggggagaaaatcgattttcaggaggctggaaatggggggaggcagaagatctttagtggtataattttcagtcatccaaaagcagtagtacataaacagaaattagccaactgtggtttgaacatgttaggaggaaaaaaatgaaagttgcatctgaccaatacagtctcacgatgtttgcttagaatttctatcaaaccgcgtattatagtgattatcgaaagcctgcagcagggtgcacataagttatacacaagggacttgagcatctagagcttttgacatccacaggacaccttgggtgccaagaatagttcgtctgtggcattagaatttcattggggtgaaagaatagccagggttcccgtcagtctaagctggctcagagagagggtcacaaatggaaggggaacgtggagaagcatggatctcacggtgaccaaatagtgccattgttgagttctttttttctcttgctttctttcttgttctcattagttaggtgttttcggagttttatatcatcaatggactcgtttcatgggaccaaggactgaatccatagcgtgtgcgtgtacaaatcatttgtcctaccagtgagcttccctcacagccccatgtcacccacttactgcagaagtgcccctattagtgtcatcagtgacgttgctgttgccgttgcctaggcaggtgtcccttcattgtcctgggatgacactgccgttcagcatgtgaccacatgggctgtccgatgctttcagagctgggtgccacttcctcacaggggacgatgaatgcaaaccatgagttgctgctcacatctctggttttctccctgcctaactggctttcccccgccgtttgccttgcttctttacctctgtccaggatctaattgctgaagtgctaaggagcttgagcccctttgatatttcattcctcggtgacctcatccaattcaacacctctagccaggatggaacccagggaaaacccaactaaacccgtcagacttaacctacttcacctgcgctctgcggcgggcgagctctctagaccctcttagcttcacctgctatgagctaatcttcaatctcctttccccacacttcagtccctgaatattctcaggctctgtgtttagtaggaagtcgggctcagacttgcccttccttcttcataggcttggctggtgcttacgtacatgcgtgcgtgcgtgcgtgcgtgcgtgcgtgcgtgcgtgagtgcgtgagtgcgtgagtgagtgcatgtgttggggcagagggattttgagagactcatctcaatagacagcatatcctagcgtggcagaacaggctgggcagcagagacctacctggagttctgatgtgagtctcccgttacctgctgaccttcctgtttggatgcactatagttcccttaattagttatgtgttcaaaatggtttcctctccacactttttctccagtcttcctttgcctgtaagtgcactgccacctcctgtctttcccaagccagagaactagcatgtatcctcattgcatctctgcaagccttcatctacatgtcctcaagcgtgccatccaatgtcccctctttacctgcccacctttctggagttaccttggcccccagtcattcctggcaccattggtttccacagagattgcagtctgttcttgtgctcacacttgtcttactatcccatcatgtcatcaagagatcttttaaaaatataaaccagaccactttattcctgccttaaagtttccctctagcttcgtctgcagtgagagccctggcgtcagtgtcttcacttctgtgtcactggcctgtagacccggaacgtgatgcccattcccgccatggtgtactgatgtttctcccacccaaacacttcagattcatcttcacgtggttggctgttcttgccttagaaacctcagctcattccctcagacaggttctccttagacataaataagggtgctgctcccctccagggaccacgttactctgttgggtccacttgtttgttttgaggcagattatggtagaagttcagccaattgtgagatctcggcttagtttgaggttggggcggggtaaggatgaggggtaactgggtgtggtcccagtgagacagcattgtgaggtgtgtgtctgtagaagacttacagaactgtacctttgaggacccttgagagccatcattcccccaaactgtaaacatcaaggacaacaaaattctgtctttctcaaaggcctaaggtggggtcagccacaagaagaggtctgccatcacttctggcaagtctcaaagacaaagatacccagacccctttgagctttagagccccagcctgtctccccagcctactgacaggtcttgagcatcaatggagaatgatgatctggggacactgttgcgttggctgctctgttgttttcaccttcttcccaggctccctttcagacagcatcatgccagggttgcgtttccctcaatgcttgagaataaagatcatggatgcagcggtgatatggagggacttggacatccaccttactccttcctcttctccctcttggatgcataggagatatggaggatcctggatgcccaccttattccttcctcttctccctcagtgtcctgctcccaccttagcctccagtgactcagtgagtgtggtcctatggagggaccaagccagtttcaaatcctggggtgtgagtccctccagcttcagtccctcatgtgttgtggacacccaccttgcctccttggctgggtcctgcttcctttctgaagtatctgttgggttgaggaagaggagaattgtccctcacagttggatgggtatgatgagaatagatctgagagaagttatagggatggatatgatcaaaatatgtggtatgaaattctcaaggaattaacagaagtattaatttaaaaacagggttaacacggtgccatatctggctgataatgattgcttggcctttagctgtttgcaaagaagccatactgacctccgctcccctcttacatttgaaattatttgggatgaaataaaaaatagccccatggatgattttctctcaatacaaatgatgtactgttaaattttcttaaatacaacccacaagctttggaccagtgagcattctttgaaagaaatgcttttatttttttttccagttggtgaataatatatatcaattgtggataaatcaagtggaaattgtgtgtattcatatgaaagataatttccatttaatgcctttcctttcggctatgcctgtactgtgcagtggctttctcttccactgtgagttttgccgtgtgatttttctgcgtgatggagagcctaaatctgctggctcagatctcttatagactatcaccttctctaccaaccaagaaacagtgtgtttgggattttgcttggtttgaaacaatttatactggaagaattataaaatgtagaatccatactatgaatttggctcactctgtatcagaaaagaagtacaactcatcacagccaaagaggaaacttcacacgtcagccatccagtcagtgcttctgatacatatttcatgatcatggctgagggctttccaaagtcagggctgtatcattcattcagtcttaaactataaggttattcttggctcttcttgttggctctcaggccttctcgctgctgatctgcatgaaccatttatcaagtcaggagtttaatctatcaaagtcagctttcctttgttctgcctcgctctgtcttgccttcccatatggcagtgcttcttgcgtgggcactgtcggcgttccagtggtgatttggaatgccgcggtctaccaagcttcttcactgttttacaaaataacacattatggagtgaagtcatatttcataggaaattataattataaagttgaccagtttctagacttccttgatgatattccaagcctgctggttgacagggtccctgggtgttactgcctacaagtcccgcctttccagatcactcatcctgaaaaccagactcagcttcacatctctggctttcttctatcctctcctggctatttattaactcgttaaatgctctggattctgtatcccggatagtccttggttctgcccactatcatttttatttcctggactcatacttctgtctttgtagaaggaaaattgatctagttaggtagcttttggtgggatccagatgtagaggccaaaactgattaagagattatgaacactgcctgccatgcgctggactatctgtacccaagctctggggacataacagtgagcaggagggaaaaggaaaaatctataaatgaacttacagcactcagggttggagaggggggaaaccaaacagactgctattggtaagtcaaatctgataatcaggcattgctgaatgcagaagagacgtcaagctgtgaaaggccatggggaagagggaggtgggtagcacagctgccgttctggagaatgtggtgtggaaaatggaagttaatggggcgccatgagcaaacgtacatcaaaagacaccccagctccaccacatgatttcctgaacatgcatctgtacccttgcagaaagcaataggatcccagatttctcatccactcccaacaggttttaatcatcctaagtcaaaatactgactacagtctccattcccagtctccattcccggtcttcattcccagcattgtctaggagaacattgaggagagccactgggttgcactggccttcatctcagccatctcctcctacttgccaccacattagatcatgagtgactccaaaacgcacaggcactgacacctggtgtctcgcatctgctgcactaggatgggtggcagaaccttggaaagtggggccttaggttactgtaggtatgggcactaaaggggatcctgagacaccagtccctttctgctcctttgctgtcgagccattccaccttcctgatcattgtccgtcaccattcaagtaaagacataatgcactatataaacaaactcaaagaaaaaaaaatcacatgatcatctccttagatgctgaaaaagcatttaacaaaatacaacactccttcatgttaaaagcactggagagatcaggaattcaaggcccatacctaaacataataaaagcaatttactggaaaccagtagccgatatcaaattaaatggagacatacttgaagcaatcccactgaaatcaggacaagacaaggatgcccacactccccatatccaatatagtacttgaagtgttagctagaacaataagacaacaaaaggagataaaggggatacaaattggtaaaggaaaaataaaggtatcactatgtgcagatggtgtgatagtatacataagcagccccaaaaattctaccagagaacttcttcaactgataaacaacttcagcaaagtggccggatataaaattagctcaaataaaccagtagccttcctttatacagagaataaacaggctgagaaagaaattaggaaaacaattcccttcacaatagccacaaataacataaaatatctcggggtaactctaaccaaacaagtgaaagatctgtatgacaataacttcaagtctctcaagaaagaaatcaaagaagatatcagaaaatggagagatctcctgagctcatggattggcagaattaacatagtaaaaatggccatcttaaccaaaggcaatctacagattcaatgcaatcccccatcaaaatccctacacacttcttcaaagacatggaaagaaaaattctcaaattcatctggaaaggcaaaaaacccagaatagtgaaaacaattcttaacaataaaagaacagctgggggaatcacaattcctaacctcaagctttactacagagcaatagtgataaaaaacaaaacaaaactgtatggtattggtacagagacagacctgttgatcaattgaatagaattgaagacccagaaataaaaccatacacttactgtcacttgttccttgtcagagatggcaaaaaatatacagtggaaaaaatgaagcatcttcaataaacggttctggtctagctggctgtctgtatgtagaagaatgaaaacagacccatatttgtcaccttgtacaaagctcaagtccaagtagatcaaggacctcaacataaaaccagatacactgaatctaatagaagagaaagtgggaaagagccttgagctcattggcccagggggaaatttcctaaacagacatgatgaatagcagtcaccaagtaaatgggaggcagagacgtactctctcgttctccccgaacgcacacacttacacacttaagggaggcagactttccgtctactgccaagaggttttagtcaaccagagggactccatattggtgacatcagggctccagtgatcaatgcttctacctctttggctcttgactgattgacagcttttaactatgtttccaccaggattctctaaaggcctactgatcttctgcactttatgataaactttattttgtttttccacttgtgtgtgtgtctatgtgtgtacatgtttgcatatgtgtgggctcatgtatatgtgggtgtatgggcacgtgggtgcatatgtatgtagaggcctgaagtggatgtcacaaatcatcccccatcactcctcaaccttattcagttgggcagggtgtcgcaatcaaacccaaagaccatcagtgcatgtaatcttgttagccagcttactttgtggatcccatgtccaccttgttcacaaggcatttctgaactcacatcctcacacctatgggaaagctctttaatcctgacacctcctcatacatggtgacattaacagtgcttgacacagcctgccacccaccagtcaagtgtgtatatcgtcacttcccaaaggctgtggtgttgaaaatgagcaagttcaggcctcaatttcaaatatcttccacttcagctatttcattcaataatgtagtcatatatatgccagcttccttgcttaataatgaaaatacaaagtgttgaaataacatatttctgctagctagtcaatattcagttatcaattatccatgtgagactacattatgcattaacttgatgggtgctctgcagtgtatggtttgtgtgttgcacggcgggcataattgcacacactcatgcatagtaagcagatgagggaatttgtctggtgtgtgtatgtgagttattaacagtgatcgccatgtgggtgcttcgggtttagaacctcattggccttctgggagttagcatctcagtttcaaagaaaatttaaaggcttcctctcccatactccagttcatttaatcctgtcaaaacagaagtttcacttctctggaaaaaagagccagaggctaatgagaggagggagggtggaggttccttggtgtggcgctctgacttcttgtcaaatgaatgacaaatgaagtgtaaatgaagaaacatgtcacacatctgtttataatggtggttttaaaagtgtaactgaatctgtcatactagccacattcagtgcacatctcagtaatgttgttgcatttgtttgttcacattgttactgtctgcagagctgtcctgtgcctttgttcactgtgttactgcctgcagagctgtcctgtgctgcactcacattggtttgttcacattgttaagtcttttagagctgccctgtgctgggcacctgttgcctttgttgttacttcctgcagagctgtcctgtgctctacactgcagcttagccctttaatagcacctctcctccacttcccacactgcagcaactaccattctgctctcccctccctcacatatgccagcagcctcacctccgtgggagcatcagtgtgtaaggtaggatgggtagattccattcgacatgaagtcctctcagttcacattgtctcatgggatagaattctttcttttcctgcttagcaacagttccttgtatcgtaaattatcattcacacacctgtggatacctgggtttttcatccctattggttgtcatggctttatttttatctaagtgcaatttgaaaatacagcatttaaatgagatctgttttcggttttctctctataaaaattaaggaagactatttgaattcacttgaaaactctggaaattcattatcatttgtcttagtttctattgctgaactaaaacatcacgcccaaagcaaagagaggtaagggggtggggcgggggagatggcttactttttactactctcaggctgtggaggagtgatgcctgctggcttgttcttcatggcttgttcattttgctttcttacagtccgagaccacctgcccaagggtggcagcgggctgagttctcacatacccatcattagtcaagaaaatgccctaacgcctgaccacaggtcagtttgatgaaggcattttctcagttgaggtttctcttcccagatgtccccagctgtatcaagttaacatcatttatagctccttatcctagattgttatttcctgaggaaactggtagcaaagattcctttaaacagataaaaaataattaaaaggtgttgaaaacaaccatttacagttctaacaacagatgctgagtgtgtttggcaaatgggttaaacaaaccacagaaaatggatggttagtgattactacagagttaaggagagctgggaacgacagcctgtccctttaagaactctgagattagattccttgctggacatgttgagggtaaagtgcacagttttgcttttacagtgccacaagtgttgcttcctgtgatggcttctgcttatatgagctaaatggcatggctcagaggtctacaccaaaaaaccaaacaaacaaaaaacaaaacaacaacaacaacaaaccatacctggtcatataagtgcgatcttttctaagaattgttgaaggctgtgaatgtggctgtataaatgagctctagagcttgtatagtaatgacagtcataatcctttcagttttctgcattctagaaattgacagagctatttattttgccttcagttctttgaagattaggttcattaatttaatttgtggttatagttcttgtgtcaactttgttgacatatgtgttgataactataatcgtctaattctctttttcattgtcctttagtccctccccatgatctctttcctgtcctcatccttggcagtgtgtctgtggtcatgggaatggtagcttccagcattagaaaacatcaataccttgctgcttcaaacccagtccttggcttctcttttgataccgcatgttttttaaattaaaaaaattaatttacggaattattctccatagagttcagttcaaagttacttaccccttatggcattataaactggttggtttgtgaaatactctgtttttaacatgcttagggatcagaggtcattctccactacagagaaaacttggggagcagcctgagaaacatcaaatgctggaaggagatgggagaagaacactattatgaaccagatgactccatcttaagtgaaataaacccaagcaacatcaaagactcacagtgtggtggtttgactatgcttggcacatagggaatggcattattaggaggggtgggctttgagactctccttctagcttcctggaagccagtctctcctggttgctgttggatcaagatgcaaaactctcagttccttctccagtaccatgtctgtctgcaggctgccatgcttcctgctatgatgataatggactaaacctctaagactctaagacagccccaggtaaaatgtttgccttgatcatagtgtctcttcagagcaatggaaccctagctaagacacatagcttattattcttgtcattgtgtctattgcctataaactgtatacagaattctgagcccagcatggatgcacatacctgtaatcccagcacttggacaggtaaggcagctggatgacagatgtgaggacagtttaggctacataataaatttgaggctgacaggagctacattgtaagcccccatttaaaagaacaacacaaaacaaaaacagtaaaaaagacacaccaacaaaataacaaaaaattgagagtccttcttggtagatttttcctttgatgagtatgaagtttccttctttatactttttgataacttttggttggaagttgattttattcaatattagaatggcttctacaacttgtttcttgccaccatttgcttggaaaattattttccagccctttactctgaggtagtgtctgtctttgacactgagttgtgtttcctgtatgcagcaaaattctgggtcctgtttatgtttccaatctgttagtctgtgtctttttattggggaagtgaatccattgatgttaaaatatattgaggaataatgactgttgcttccttttatatttgatgttatttttatgtttgtgtggctatcatcttttgggtttgttaaaggattactttcttgctttttctagggtgtagtttcctcctggtgttgctgttttccatctattatcctctgtagggctggatttgtggaaagatattgtgtaaatttgtttttgtcatggaatatcttggtttctacatctacagttattgagagttttgctgggtatagtagtctgggctggcatttgtgttctcttagggtctgtatgatatctgcccaggatcttctggcatagtctctggtgagaagtctggtgtaattctgataggtctgcctttatatgttatttgaccccttaaccttatgctgttaatattctttctttgttttgtgcatttgttgttttgactcttatgtgactggaggaatttattttctggtctaatctatttggaattctgtaggcttcttgtatgtttatgggcatctctttctttaggttagggaaattttcttctataattttgttgaagatatttactggccctttaagttgggaatcttgtctcttttctatatttattatccttaggtttggtctcctcactgtttcctggattcctgcttgtttggggttgggagctttttgcattttccattttctttgattgttgtgtcaatgctttctatggatcgtctgcacctgagtttctctcttctatctcttgtattctattggtgatgatgcttgaatctatgactccttatctctttcctaggttttctatatccagggttgtctcagtttgtgatttctttatcgtttctatttccatttttaggtcttggatcaattccctcacctgtttggttgcattttcctgtaattctttaagggatttttgtgtttcctcttgaagggcttctacctgtttacctgtgttctcctatatttcttaaagggagttatttatgtccgtcttaaagtcctctatcatcatcctgagatgtgactttaactcagaggcttgctttcctggtgtgttgtggtatccagggctcactgtggtgggagaactgggttctgatgatgccaagtagctttgttttctgttgcttatgttcttgcccttgcctcttgccatctggttacctctggtgttagctggtcttgctgtttctgactgtggcttgtctctcctgcaagcctgtgttttagtactcctggaagaccagttctctccaggaggaatttgggtatggagagctgtggcacagggtcagctctggggtgcagatgggacctgaaaggatccagtccctggctgttccttggttcctgtgtcctgatggttctggccaggtccctctttgacccggaaactgagcaaaagtggtggtcttacctgtgcttacaggtgtgttggcactcctaggagaccagctctcttccagtgctatttgcctatggaaccctgtggtacaggatcagttcctggagcagatggaaaccataaggatcctgtctgtgtcttcccatcttgtattggcttttaggtgctttttaaaaatgatgttttcttaagatgctttttgctgggtggttcagtttctgggagcctccaagggtccaggttactcgagtcttttggtctttttttgtggagtccttgttctctttaggtccttcagtcctgccaactctttcataagacttcctgagttcattctaatatttggctgtgaatttctgtatctgtttccactgggtccatgtactacattttaaatggggcaaaagttcagaaaggttttgctattatgaaccctctaagcatacttacacgttgcagagtactatcatgctttcagtcaagaatgaatgccatagccagatgaagcatgccttctattttgtcacttggccttaagggctgccgtgcagcttggcttgccatagagtgtgcttattctgcatgctgcaggagctgtaaagttgcggatgagaaccacaacccctggtctccacggcatgcaacttgagtgctcacaatattatggatacaaacatatcctagcagcaggcaccacaaagcatgatataaagatgagaaagtacatcttcctttcatggtgccacagggacagttgctgcaaatcggacttgcaaagtgctcagcacagtgaacccagctaggcattccattttgctttctgctactgtctgcctagcacccgagtgctgctgtaagaggcccgcagggaggacatttacattggcggttacactccacgctctagtgtaggcttggcatttctccccatagacggctaactagtaaatattttctgcatctgtcacaactgcacaactctgtcatgaggcctcacattcttttgctgtgatatagatggtatgcaaacacatgattgcagctgtgtctccacaaaattaaattggcagagtcatcccagtgtgccctacactgttccctgttcccagtagccttctgaggcactaaatttggatgctgacaggtgcagttttcctggcttggatgtttccctttcctttcatagttatgctaaccctacctgacaaaatcaactgagggagaggtcattttggctcaccatcgcaggttatactgtgtgtcatggcagaagcagtaggggctggaggtagccagagctggaggcagcagatcaagaagcagataatcagaaagaagagcttggcacatgcttgtgctcagctctctttttttgtttgaccatcaaggactcatgcctagggaatggtgctacccattatgggtgtgcctttctttcccagttaacctaatcaagataactgcatggccaggcccatctcccagatgattatggatctcatcaaattgacattgaggttgtctatcttactctattgccccatctcaaaatggtcagtctccagttcctggagctcatgtttttgaagaaagaagcttcagggatccccaaccagagtctggtggtattagttacccccactcccacacagcatgcctgggtctatgctggctgtagacctctctctctctctctctctctctctctctctctctctctctgtgtgtgtgtgtgtgtgtgtgtgtgtgtgtgtgtgtatgtgtgtgtgccttttggttctgcccctaccctggatcccagtcatctgccacagtacttggggcacaggaggcacatcacatacatttatctactgcttaaaggatgaaattatctatatctcattcatttaggggtctaggtctagcaggtgaagtttattccaagatttacaacatatgagtctttgttccaagattccaaagtggaacaatataaactctgccgctagtaacctcatagcactgaggaaaacaagcctctcagctccccttagttaagtgggggctatgactggggcaatctgtggtgacagtcactctgttctctcttcgccttgacagctgcctggtggaaggagttagccactctccgttcctgtcagtgtcttgtgctgtccttttgaaagagatttcttcttactattttaaaaatatgtgtgtgggtatgtgtctgtgtgtgggaatgtgcatgtgtgtgggtatgtgtctgtgtgtgggaatgtgcatgtgtgtgggaatgtgcacgtgtgtgggaatgtgcatgtgtgtgggtatgtgtctgtgtgtgggaatgtgcatgtgtgtgggtatgtgtctgtgtgtgggaatgtgcatgtgtgtgggtatgtgtctgtgtgtgggaatgtgcatgtgtgtgggaatgtgcatgtgtgtgggtatgtgtctgtgtgtgggaatgtgcatgtgagcacagctaccgaccagaggcatcagatccactggaagtttcccactgttgggacttactaaatgtgagtgctgggaactgagctcaggtcctattcaggagcagcaggcactcttaacccatgggccaccgctccagcccctctacaccctctgcctgacatcccagcacagggctatgctttgatggtttatagatattttggtgacttctctcgttcttttatgttagctactttctcattgctgtgagaaaatgcccaactaaagcaactgaaagaaaggaggaatggtttattttggtttgaagtttaagagggagcccagcccatcatggcagtaaggtgttcctctaggagtataggttgttggtctcagttaggaagcagaaaggatcaatgttgatcctcaagtggcttcctctatttctctgttttattcattctgggatcccagccatggcataatgccacctgtagcagtttccccccaattaatttaaatgttagtgcaacaaaaaggctgtgattggacagggaaaagggaggcagggctaggagtttcagtggagacaggtaggggaggaaggaagatgtaggaggaacaggacgatccagattccgtgtggctttaaatagccacaggtagttatgattatattataagggatggataattacaggacaatttgtcttatctaggtgggcaatttatatcattatcaattggctctgaaattattgtgtgggcatcttgtgaaatgagaatttattgatatataaatctgactgattaattataagcttcaagagttttgatttactgggttaaggggaactgtgaccgctgaccacagggggtggatggctgagaaggcacgggtggctctgaggccagcaaaccagagaaaggaagactgcctactggggttagccaaacagtggtgggacccctgggcagtgagtagctgggtataacacaggaatttggtgtctttttaaaatcatttattcattattatttcaaagacccacatgggtgggtctttgctattcatttaaacccctgtggaaaccttcaccacccgtcccagaatgtgtctcctaggtaattccaaatctagacagtttggcaatggacactgaccaccggcttgcttcactgtcctgcctttaactatagctcagtgactagtctggatcagagccaagggtaacagggtgatttcccttctcctggaacccactgctttgttgctggttcattgtaggttcctcatcccttgggaagactacaagatactttgaacatactttctccagttatcatcatgctgaaaggaataccactctaaatgctagcccgagcaaggcctgaccttggccattctctcttcttttctatctttcacttctaattagaacgaccaacaataaaaacacatgtatgtgccagctccttactaccaacgaggtgctcgtttgacgctcatggaaattctcttgaagtatctttatttctgccaagacaacaggcacagggacagaggtctgtcacagcctggattacagagcacgtagctgtggagctggggacagactgagctggcccaccatccttctctgttctcagtgtgattagtgacttctgctcaccatcgtctaacagcacaagcagcctcaggtctacacacatctctacaagtgtcagagaacacagatgaaggacaggcagtgggtagtgaccttcagaggctgagacttaagtggaaatgtcgagagagtatatctgatactaggcaaaggcgtctctaacagacagaccgttccagttctgggatattccagctttggaagtcccaagggagatgaggatggccttgtgcatccgtgctgctttctgtgtggagagcagaagctcggacagtcagagggtgcactcaaccacaaggtcttcttcagtgttggagacagaagtagatttttagctataaataaatttttttttcctaaaagtgaagttgattcatgaagtaatatggagaggataagacagcctcctctccctcataaactagccactcccctcatgcctggaatgtatacagtcataggaagtaactgtcactagaatgtgttgtagacaagatgttaggttagcacactgagttgcatcatggtggttgccgccgtgggtctgagacactcttccaaacctggctggaaggcgcagctcatccatgaagctgtctcctccttctctcttccctctgtgctttgccttctgatgtttccatcttcactggctgattctcagtctctctgaggatgtgttcccaaaatacagcatgcactgcccacccaaagatactctttcttcacagactcccacatactgatgtaaatgggaccaccaacaatgacttctttaatgacacctaaatcagtgtatagatgctttgttccttggttttctaagattggtaggagtgtggttatagtgtctgaatgaggaatgtcccccacaggcacgagtgtttggtgcttggtccttggttggtggcactgtttccgcagttatagaaccttcaggaggtgtagccttcatggagaaaatgagttcctgaactgtttttgagcgcttatagctatcccacttctagattgagctctgtgctttggaatgagtttgggatcccccagctcccagcttcctgctcttgccatctggtgtcatgcctcccccacccgacacccacccaccacacacaaggggaccatgagcaataagtaaagaatctcttccttaagttacactcagttgtgacattgtatcacatgaacagaagactaactagtgcaatgacttacatggagaacagaggatgcctttgaaagcctattttttttttttttttttactaatgaagccaaatttactagaatagatctttttgatcacatctggatatgtaacaaaattgtttgtgtttaagaaatgaagtagatttgtagatttgatgcctctctcatctcttttgtttttaagttttcttctttttcttcctcctcctcctcctcctcacctcccccctttttttaattatacaaggtctctatgtagttaaggctatcctgaagttcaccagtctgacctcgaaatcacagagatccaagtgcttggatagaaggcctacaccaccattcccagccttgatgcttctatttttattggaaagaaagagttcgctgaggaagttgcatgaggcagacattgactgggggaacaatacagactggggagaagtggtggagaggccggtctagaaaaaggaaagcttgtccacaggatttacagagcagatgtggaacatgcacgaccctaggaggccagaaagctgtgagttgagccctggagtctgggtttggtacaggtaaatctgcttggggagggtgtgctgctgagcccagggcttcttattctctggcacctgagctcctctttgtccctaagtgacatcttttgagtgacagtattttctgcttcctgttttggttttcaaagcagccacttgggcagcacagtgtgctagatcctgagaggaatcttgtctgaaatgcagatttgggttttgatctgcattttgtaggtcaatagtctcagttacttggcagtaattacagggctcacaaggctgttgctcctgaataatttatcctctgttagctacaaacaaactctcctaaggaacagctccctctctggctactgtttttccaggggagcgaggtggttcatcccttctagagttggtcttgagtacagactctccggtcacagagatgtgacctgaagcccacactgagtaccagacacgcttttctcttcctagcctcaggcacggatgaccccgtagatgtgttcttaacttggcatgtgaggcttcggagcatatccttgtctatttgtgggctttggcagcaggaagcagaggcgaaagcttttggtgatgcgcagagcaggctgatgaagcgccgtgcactgacaagtcctcttccatcatttccattcgggttttaaattccgtgtttatcccgttgtttgcttgtttgcttgtttgtttactggtttgtcctgagacacccttgttttaaagcccaggctgacatcagactgggatccctctgcctgtgctaaaacagtaagcatagcgcaatctttcttttgtaagaccatgggttctagatactaaatccatgtccacatgtttgcactttatggaccgtgtcatctccttagccactaaacttttaaattttaattgtcaagaaatagttgcttgcatgttgccctggggaacagcatgattggttgactgactgattgattgattgattgattgattgatttgtatgcattttgctacagcatcactcacatggccaagatagtttgcacagaactgcagtgggaggcatgggagggatgtgtcactgtggcttctattgctgttacagagtctctgccaaaagcaacttttcagggaaaatgatttattctggtctacagttcaagggtcacagttcaagggtgcagtctcccatgacgggaagtcaagcggcatctggccacgtcctattcatgatcaggtgtcaaagagtagtgagtgtgcatagctgtttcttcctccccttctctgtgttctgcttctcaaacccagcctagggattggcgccacccacaaggatttcttcaggataatgagatgctcacagacatctcagaggctcatcttccctggaggaaggggtcatcatgcccccagggcagaggctgcaggctgtttatcttaaagagtgggttttgttaagtatggatgagtgtgtgtattagttacctttccgttgctgtgataaaatgccatggcctaaaacagcttacagatggtagaaattattcctgctcctggttccagagagggaaatgcataataagtgtgtgggttggtgagggttgcctagcagcaggaagccaaagcaggaacccaagagatccaatctttagcacaggaaactgagaaagcaagctgcaggtgggtgtggctatgaatactcacagccagatctcagccatggccttcttccagcaagcctgcacttcctcataacctcccggaacagcactaccaaggaaggactgaatactgaatactcatattcctgaccccatggggaacatgtccagacccccacaatggtgaccactggcctgcaggctcttgcttagtgtttgtctccatttgtggaagttttctcttccagtcttttctcttggaaatacagaagggaaacagacacctgcctggtaagtttgacttagatgcatcatttttcatatcgaagccatggtcatctgtatccaaggacatcgtttgtgatccctaaatacctgcattgttctcctgactccgccttaagaaacaaacacagctttgacattcagaaagtccttgcagggaagcaagtgttttccttcccaggacagcatcttagagcccgagactgtgctttccgactgccccccaacctggcacccttttcctttgggcagataatgattatatctgggctggaaggaacacccaggatgcccagttacctggttcaggggccagaactgaatcccccagttctttctctgtgatttatgcagcctgtcctctgattattgctagttagagagaaatcaggctcatacatttctgggggagccaaggtaaaaagacagagagagggggggagggagagggagagggagagggagagggagagggnnnnnnnnnnnnnnnnnnnnnnnnnnnnnnnnnnnnnnnnnnnnnnnnnnnnnnnnnnnnnnnnnnnnnnnnnnnnnnnnnnnnnnnnnnnnngggagagggagagagagagagagagagagagagagagagagagagagagagctcttttgtcagagtaataataacacttagagcttctattgggctttttatcttcagagggcttgccgagcattagctaattaagaagtctgcacaatatgcagcagctgttggaaaaataaatgtgatgcttgggtgtgttaaagaatgcgtgcagaaacacgagggcatcctccaccaagcacttgtggggctcacactgatgggtttgcttcacctggtgggaccgagcagacattccagttagtcctgtctgcagagtaagggtggctggggatagacagaggcggcatgtaatggagactgcaaagactgtataacacacacacacacacacacacacacacacacacacacacacacacaaagactgtataacacgatgcacagaaggaaagccaaagagaagccccagagcctaatttctgctcacgttctacagtcctaataaaacaggcttctagcacgtcaatactgacaccctttccaagaagaagcattgttcctgattcacgcagttcactacacgcattgcacagaacacccgctagatacttgagaaagatgcttagaagttatctgcgtgagggctggagaggtggctcagtaggtaagagcatggctcctctgctccaggacccgggttggattcccagcacccacgtggccactcacatccatgtgcgactccagttacggggatcagatgctttctgctggcttctgggggcatgaggtgcacgcatgtgcttagacatacatgtaggcaaaacagccgtacacagaggacacatttctaaaagcttatgtgaagaggagatgagtcagttggtgatgctggccccacaagcaggaggatgtgaaatctgctcaccagaaccacactaagaagatgggtcatcgtgcttgtcatcttggacctgggaagatgggtttttgtgtggtgtcgaggtatggtgacctttctttattagtgcttttatagatataagccaagggatcagtgtaacagctgagttggagcttagataatggaaacaaaatgagccatctgaaactcttctgttgttgctcggttttcgtctttgcattggaaggtgggcagcttttgttttctcccctcttcctcgcttttcatagcgctctccattgattgcaggctgatattctctttaaactgtaaattctacagggttgaccagaggtcatccatgaagagagaggagaattagtggatgtctgtgtactgttaggtgcccctgtcacctgtgggctcaagcttacacacctgcaggacagattagatgcctgccctccactggctaaagaagaatcagagttctgactgaattgtctgtcaaattggggttatgaaaaaacaacttcctccttctgagaggacaagtcacgaaggagacaagagagaggtggcttgagaacagggggtattcaagaaattgacagagaatgcagaggcactgtgtctctagactggaaagaaactttctgaaggaaattatagataagctcactttgctaaggaaaattgcaggcctaaaactggaagaaagtaagaatgacaagccaggtgacgttacatccccagtccagagtcatgcaaacaaatgggcatccactcggcatatccggcagaatggcacagcacacggtgatgtctgcagcatccaaggctggctcacgagagcccagtgccgggaccctgaggcatctctctgcagacttggatggggtgtgctgggcctgtcatggttagaaagaaaaagggatctggtgttcactggctcctctggagcatcggttaatgttgaaaataatcgagagcaaacacaacgtctgatttttgttccggccatgttttctggtagaggaaggattgattttaagtaaaacaagacctgaccgtataacggaatatcatgcagctatttgaaacaaaagcctttctttatcaccacatgctgcgaatgggtaaagcacaggaagataaatgtttggagggctgcaatatgtgtaagcgatgagcgtatgtatttactggcctttacctgtgaagacatggctgactttctctggaaggataaagtcctttaggaatcacaggagacacctcttccccacgttgcctccctttccattctccatcttctaaaagctcccttttagttttaggtagctataggctcatgtgtggtagaaagagctgggagtgtagctcagtaaacaacatacatagcatagataaagtctagtgtccagtctccaggatgggaccaggggagagggaggaaggagagaaaacgaacataaagagatcccttcttcctttcatcccctttccatcagagctaacactttgcatcaatatatggcttaacaccaggatgacaaagttgacagtgaccacatttcagtttgccagtgttatgtgcaatgcaaaaacatatgtgtgttatgtaccatacatctttgtcacatgtgtacctgtcttaattagggtttccattgctgtgaagagacaccatgaccaaggcaactcttataaggacagttaattggggctggcttacaggttcagaggttcagtccattgtcatcaaagggagaagcttggtagtatccaggcagtcatggtgcagaaggagctgagagttctatatcatgttcataagggaatcaaaagtctagcatcctcaggcagctaaaacgaagctctctcaaagcccgcccctgctgcatgtagttttaatgcctttgctccgggactggccatgctaccagcccccacgcggcatcccttttgttctacccacctttagctctgggaggtgactgcactacccccagctcttatagcttcccttgaatcctcagatctctctctctctctctctctctctctctctctctcacacacacacacacacacagagtttgttccctttacaacttgttttcttggcacaattgctgggcattgctatctcccgcctagaaaagcgtgcccttaccaatttatcacctctgtctctttacctgccctgaacttgaatggctagtcccacctggcccatgccagacatccttggccacccacctgtagtggtggccacagtcccagctcaccccaccccccaccccccacccccaagacctcacatggttgctgtgtccttctccctccacatcatggcagaaaaacctctctcctcccttgcctctcccttttcctcctggcaccaggaagtcccacccataccttctgcccagctattggccccaggctttctttactgacagatcaagaaccaattggggaaggagaccttagcatcagaactgtccccttcatacctcaacagtgacacactgataggttctctgctgccaaaatgaccaagttcaagtcagattagattatattaaagatggctttattgggaaggtatactccttggtttagtggccccaaggaccaaggacagggaagtcaccatatggaaagggggaggataggggtggggcacacatgcaaatgtaagacccaaagatccttaagtccaggatgtcccactcacagaaacacagagactgagaccttttcattcccccctttagaaagggtaattagcctctcccttcctgagaggccagtgtttcatgactgcccctaagcagcattgatggccctgggtaaggtgaggtcttagtcagtagaagagggaactgaaacatttttggttgttatctgtacctgccttgcagttggggctttcttgtaaagcttgttttgctgggtcattccaggaagggactgttcctcacaaccttctagcgggagatccccagcatgctattctagcaaggtctttcagcggtcatcttatgttctctaaggtcacacattcccacacagagagagaagaggaggagaagaaatgagagagagacagagacagagacggaaaatgacagaggagcctctgggggaagggcagcccagctactgggctgggaagctcaggattgatggcagagtatgccaggtagagactgaggaattctgggagaaccaggaggccaagtctgctctgatatgtaaaatatgcacttcagtcccttgtcctggggtccaaaaccaaagcacacttccttcaacaaggccacacctactccaacaaggccacacctcctaacagtgccacccctggaccatgcatattgaaactaccacagtaatgctgtgtaaccaacagtacagtgaagacacagcacttggaccccgagttaacctcatcttccaattcccagacaactcccttctccccaaccttatctgtgacaaatgcaaatctattcttcttggtcataactttgtcatttcaggattgccatgtaagtggaattatatagtattgtgacttttggaaattggctttttaactctgttatttctttgtgactcatctatgttattgtgtatgtcagttcaccaagacaaactatttgggattgtttttatcctttctgcaaatacggcttctaactaaaggacaggctgtcttccctcgtgctgatgtgttagggtatctcaatcacttcattatttatcttccattccctctcccgtgtgtaacagtttcctccaagattgaaacattccgtcctgcagggccgctccttaaaacaaaaaagcttcaggaagtttctggatctgaccaggaacgtttgtcccacagctccttcaccactcgtcattcattttcctgacggagacttgagcatctcttagaattccttgtctgcttgtttatctttgagttccaagtggcttctctgtttatatgattgcgattgtatatgtaaatcaataaggtttattggtagtctattcctttcttgccttttgagttacttttcaaaaaagacctataaattaatttttaaaaaaacatactaaatgagtttgggttcattcaggatacattcctgtgctcaagcaggtagccctgtaccacagacacacacatggctttgtgtacattccatgggttaagacgaattaataggactcagagagtcctgggggaacagtaatggggcagatggcagaaggattagatagggttagagttgatcaaaagcacctcattgggcaggcatgtgtaaaattctcaacaacagtaacaagctacaacactcccaaatcttgctctctcaatacaaatgcaagaaataacgtctctgccctgtgcccagtcctgctgtaggcgggaagagaagtaaaggtgaaagtcagaaagacgagctcgaagtgatccggaccgagttttcctcttagaaccgctgtcattgtgtcccatagcttcgggtatgctgtggtttcattttaaagaagtgtgtctgctgttttctaggtggtatataaaatttccattatgatttgttgaacatttattattaatttttaactgacagatattcattgcacctagttcctggtattaggcaagaaatccttttggtttatcatatgctttggtatcttcaatgtctcctctgtccttattgttccctcgtcttccctgctaatgcaattttttttctctataaaatctagggtctactatgagaagaaatcaggcatcttctgtccttttgagtatggagtttctcaaaaaatgcacccattgtcaagtaaaatgacgcatttcattttactttatgtctaaataaaatatcatcatagatgcatatcacattttcatcatccaattatttgttgatgaatactcagacttattccataactacattaatgttgataccaaatatttctttgatacattgacttagattattttatttatatactcgtaagtgatatagttggaccacattatagatcttcttttgaaatcccaccacctttcatggtattcatattttcgttatcagtgtatacagtttctgtttacttatatcctcagtattatttgtggtcattttttgttgttgttgatagcctttctaactagatggagagggaattgcaaagcatttttaatttgcattttcctggtcctttaagatacctgaaactgctttcaaatccttattcaataaatattcaatacttagctcattagcccatttattgaatggatggcttgtggttttgttatctatttctgcaactttatatatgctagatgtagatctgtataatctataatccacattgcccccattctttttttttttcccccccgagacagggtttctctctgcagccctggctgtcctggaactcactctgtagaccaggctggcctcgaactcagaaaaccacctgcctttgcctcccgagtgctgggattaaaggtgtgcatcaccatgcctgcctcatttcctgcattctttagattgtatctttattccagtgattgtttcatataaaaaacatttcagttccattaaagaagaagaatgaggaggaggaggaggaggaagaggaggaggaggaagagaaggagagaaatctagagagaaagcattcctgtggaagtttccccagcaagcctcagaagctgaaatgcaagggctgcccagggcctcttaagcacagagcagataaagctgtattgcccaggccttggggttttaggatccaccacttgtcagttatggaagaaagcagggagccccaatccatttctaatgttcttgaaattattattatgagagaagtgtggaaatataggcaaggttctcgtatcaggtctaagtcacagaaaaccccacacagactgtggctgttacataatggaactgtcccttggaactgggaccaggtccagatggacactatggcctggtcattccagtgtgaaaagacagtgtcacagacatgcacgcagactcttcagacaaggcctcccgctcctgctgtgtagacagtaccctggcttcaggtctccccaccatagctggatgcttcattaccatgcttactgccaaagggctcacttgctgctccttggcgcatgtccctacactgagacggacctgatggccttgcttgttacatgacatcgctgtctgaatgtaagaagagaaagaatgaaaggtcagtgctgagaattcctaaggcctttctttggcagggtgtgtggaagttgtcagatctgaaaactttgtttttagcgaattgaaatctggtcaatcttattcatccttttgtatgtccttgatgatagatgtttctttaaaacgactttcagggaatgtatcatgtgcatattttattctgaacctgggatatgtgccaatgacccctggaagaacatttcatgtctctttttgttgtatgaaagactgtctaggtcattgtaaccacagagcaagtcgattcttggaggagtcttcctgggacccttgcttgccgtgtaacttttatggtgtgaagctctgactctgtttcagatcagcagaaagccaatcatcaccatcatcaccatcatcaccatcatcatcatcactttccccgtgtagggccttactgtgggttaggaaagtttgagtgcgccttgactatgtgaatgtttctgtgtgcacacgtgagcttgccttgactgtgtgcatggttcctttctaggcttttgctttttcttgcctgccactggaccctgctaaatctccacctgtgaattttattcccaggttgagtttggccttagcttcccttctattgatcatactacaaaagattaatattaagggcagtttagagtcaacaagaacttgcagctggtggtgccatctgtgcctgtcaaactgtagccaagtagctttccataatggaataaaaccagaatctgatcatggcttctgctgctgtgggtgacagagaaatgagcctgaggaaaaggaggaggaggaggaggaggaggaggaggaggnnnnnnnnnnnnnnnnnnnnctctagagactccacaggtgccaattcttgtgcacacagccctacttctcctgagtccaaggggaggttggtaaccccaggagagatgggaacagaaagggagtcaagtggggctggtgaagaagaggttaatacagaggtttgagcttgtaagggggtacaagtgggtagaggggtacaggcagaaggcggggtagaagcaggagacgaactaggaggaagctgaagcagaggtggagtaggcaagatatggacaggaagaatggttactggatttggggctgaaatgggtattggagctgtggctagggcagaagttatagcagaagcaacagaagcagcaggagggagaggagcaggagaaggagaagcagcaggaggagaagcaggaggagcaggaggagcaggagaagcaggagcaggcggaggaggaggagcaggagaaggagaagcaggaggagcaggaggaggaggaggagcaggaggaggaggaggaggaggaatagcagcagccgccgctgtcatggctcaataatgggaaaaaattctagaaattggtcaactttgacatcttggatctgtgtggccgttatgtgtgttgtgtgtgtgtgtgtgtgtgtgtgtgtgtgtgtgtgtgtctgtctgtctgtctgtctttcatcttcgatcttttctagtgtctaactgggtacaggagaaaagtagagtgataaaagtgagaacagggaatgtccagggaaggtgcagggctttcctggctcggcacaggaggatggcagagatcacagtgagggacatgggggtacctgcttggtatgtggttcctaagctctgttttttgtgaggaacccgagggttgggagaagcaaagacatgaagagaaaggtgttgccactgtataacgtgtctacagtaagaagaatggtaagcggtaaggagagggtcctgcacgaacaggagaaaagccacagagagcatgaaactcttcttagaaggagaagcaaatggacaacaaataaccaaggaggtattcagcctcgtaactcagaaaggaagtgtaacttaaaactacagtagctatggacactaaagaacacacctgctaagcaagcaaacaaacaaacaaacaaacaaacaaacaaaaagattgccagacacaaatactggtgtggatacataacaggcaggagtctttcacacgctggtatgagactaatcagcacaaaggctatgtaaagtttttattaccacctattaagattgattgtatgcattccctgccttcttagcaatactgctcctagtcacatgtgcaaacttagcgccacgcatgcatgcatggtattgaagctttatttgcagtggccatatttcagaaatgtccatcgaaaggaatgactattgtatcctagagaattatgtaaaatcatgaaatgcggacccttctcacatgggcgcgaatagaaaaaaagttcagatgtcgacatgtacattctgcatgatttcctttatgcagaattctgtcctatgttacagtgtttgattatggtttcatatgcattggctgaactgaagtgctccgtctctgtgatttctaccctttctgtgaattgtatactggcatattattatgtgttctctagggagatgcaaacaaatccccagatagggatctgacagcagaccaaaggccagcggggaacagatggacttactggggttgcttacaagaccatggttgaggggtttcttgctggagcagaaatgacttcaaggcagctgtggccccagccgctgtcaccaccctgaaggtttactcctggtagcatcccctctttccagtagaccttaggtgcatgccaccctcccaagttgcctgtaaaagggtagagtgtgatactgtagcaacagtctcacacgggatctagtcttctaactacccatccccctccgcatccttcctgtgtggtgtggtcacagcaaagactcaggttgtcatccagagccagagctgtctctgactgtatgcgttgaccaagctgcttcatctggtgtgcacgtccattcagttgcaggcttagtgttgggaaagcctgggcatcctccacactgtagaagaagtgtggtgactacagaggttatggtgggccttagaggtatgcagggtgtgcgttaagccacgccagccctttctacattgagacctcaatgggcgaaaacactggtcagtgttgagtggaagacactcttccaatgatccgcaaaagaaccacacatgtctgagtaggattagcttggatagcatgacggctttagtggacacagcaggcaaaaatctgcacattataagggagcagaataaagtcaaaagaatcccggatctgagccggcattctgtacatggaagccatcctgtgttaggaaatatcgtgcggtaggggagggggagtggggaggtgtacctgcaggcccatgccaaggtgccccctgagaaatcacaccatgcaacagatctgatataaaaggggggttacttgtgggaaaggaggggagtgagggcgtagaaaggggatagaagcagacagatgagagtagatcgaggagggcagagaaagggggaggaactggatggaaacatattggaacagcgagagggggggaagggaggaaaagagagtgcaccaaccagccaactgggggtggtgagcatttcttttatacacgcccacacctggaagcaggtaatgacagatgatgacagaagccattgctaggtccctgagaggagcctagtggaattgcctataagccaacacccaggaccttgtggtcttctacactgtccataagccaagggcgacacaaaggcaccaagaagcacgtgggagtgagtactcctggagtctaggtatggtttgcacaactacaaaagcagaagagactggaaaagcgtcccagaacagcgggactagcaatgaccactgagaccctaagaagcccaggtttgctagcaaggccatcctggacgtgggcatcctcttgtgggtcaagacaagctggtcattcccagtccgaccagaactgaatgtctgacttacagagtatgataactaatagaaaaatcacaaggcacgttagaaaatatgatcaaataactgaatttctaagaataagggaaatgaacctggcatctttgatcttgtaagctcatcagccagagtttaaaataattaagactaatttgtttgagaaaacaaatgtaaacgttgcttgtttcacaactggaatcaattcatatatgtaaggatgaaaggggaaatcatagaagtgagagattaaactagaacacacaggagatgagtctcctagcaggtcacatacacatacatagtaggagacacaaatggccaagctggaggcattgattaaaactgtgaattgaggaggtgtgagcaggagagtggcaggccgagagaacagcttctgtatgaggcttggcacaacctagagtgtccctagtgaacaaggggaaggcagatgaattgataaatacttatagagcagtggactttgcctccacggtcttaacacacttgacgtgaactagtctgcaaggaaaataatctaccacaaatattttgagcaacattggcttgtcacaaacttgcctggtttacctggaatcagataaagaaagaaggtggatgtagtgtttgggacaatggtggctgaggggtcttcaaaatggagaagcacttggaggcccaacttcaaattggtccatgatcgcaggcagcctaagacatcgtgagccccatgggaatgattctgccagaggagaacccaacaggtgattccgctacaggtaccaggagaatgaacaacaatgagaccagaattgcattttcaaggggcatgatggcatcccaaagccaaacaatggcatcttcacctgttcacgggaaacacctgccagcctggagctgtctctggagaaactgtccctctgtatgcacacagcacaggagctgactcgggggttggaaggagccacttaggcaagaggagtgattccagatagacggacagagtgacaggagactgggcgagcagatgagaagggaaatggacttgccgttgtgtcagacaaaaccaggatgcctggtgaaattgaagtacagggcatggtagcccgagcacaggagaagatgaagtcgaaagcaaacgcagggagctgggaaaggtcaaggctgagtaatgaaatggctacggttgtcactaaaatggcttttaaaaagaatgtagaagtgacagactgttaggaaaagggggtaaatttcattttaaaataattcaactttttttaaaaaaagaaataggtgagaaaaacaaagaaatataaaacaatttagaatatgttagatttcattttggatataaccatgtttttccattatatataaacactctaagatttctcctgctcctacagagacacattctaacatatcaaaacccagaagggaaaggagatggtgtgaaaactctcatccagaggccgtcagtccatggacttgctggcattggatactgtgggctgtaagacaggaggctaccttaatgacaggtggtactgagaagctaacatcctcacagcagaacccaacaaaatcaggaacatgagattctgtcttgagtgggtgttttagtgaactcttcctccttgaacttggagtttgagctgacagactatgaatggggatctggggttgaatgtgaagtgaccccctataggatcataggtttaaatggttagtacccaattgtagtccagttttgggaggagagggagtctcaacggagcagatgggagtgggccttcaggttttatagtctggcctcatctcccgtctgtgtctggtggtatgagcagtgtgaatgagcagtgtgaatgagtgtcagccttctgttcctgctaacagccctttatcccttgatagactgtatcccttccaactttgagccaaataaatgctcccttgatttgtttcttatcaggcactggtcacagcaacagtacaaatatccagtacaaatgatattgttggtttagggtctggtggtgtctctgtggatgatagtgtgtactgcacaaacagagggatctgtgttcaaatcctcagcacacagagaaaatgcagggtatgcatgtgatatcccaagcactggattgggtacagaaatgaggatcattggggcttgctggccagtagcctttttctggcaagaccctatctcaaggaaatactgtgtgtgtgtgtgtgtgtgtgtgtgtgtgtgtgtgtgtgtgtgtgtatagagagggggaaggagagagagagagcgcgcacaagttagctgtgggtttagcctaatgttgcttgtattctaatgttaatttggatcccaaaattgtttgcatgagagagtccacaagtccacatgaagaaccaggagagaccctgcccccagttggttctgattggtaaataaagatgttggcagcccatggctgggcagggcagacagaggcaagatttaggattcctggacttggaactgggagaaggaggagatctgccatgcatctgagtgtagatgggagagtggagaggagaggagaggagagacacccagaccccatgcttgaaaatagtgcaggacagagaggcatggctaccatgtgaaggagccaggagagcatggtccagagcacaacccagttggcagccctctgggtgcagagcagcctagatagaatatggagtttaggaataactcgggattattggtgggaggtggattaaccacatggaggttaggaggtggcccagctattgagctgattaaggcatatcaaaatataaaggctgtgtgtgttttttgtttggaatgtaaactactggggcgggtagcataaaccaggcaatcaagatgtattattatgtaattcaccagagggcaggatactctatgccatgcatattcacatggacatgtgcaccgaaacacacacatacatcatacctgcacacacacagtaagcaaacaaacaaacaaacaaacaaacaaataaaggcattggtttgagggatatggttaaccagccagatctaaatgacatatcaacgccatatacagcaggctatacatccttttcaaggaaacacagtagttaccagaattgatgagtacagttcagtaatgtaaggctttcgaaaaagtcagtgatcgaaatcacacagaagatttcttctgaacacaataaattaagctataaatcagaaacagaaaagacaacaagagcatacccatatcctatatccctaactcacgtaggtgcatttgacgtgagaggaaatgcccagtcacgttccataaaagctggaaatagcactgggctcgccatcagaacaaggaaaataaatgctatatccacatagtctggtaatcaatgaagaagctgccacgcagcctccctcctttgtgagcctgagagatgccatgatgagccaagcccggtgcagagagccgcctgtgagattccactggaagattctaaagcaggcagtgctgggctgggaggatgcagctcacagtagcagtttatattttatccacatctttaaaatatatatgtggaagcacacactcacacacacaccctgtagtaaatgcctcaagattgaaagcggcggaagttttttgaaagagcagaaagatggtcaccgttacagggcggacacttttgcattctcccttcaggatcctctgtccctcaggtgcctactttgtgctccattggcaatggtgcttgtatagttattataaacagacatataggctcatagtatcactcgactttcttgaatctcttttctcacctttatattccaaatgtgtgtgtgtgtggtgggtagcctggtgagacaggtaaggatgggtggggccatggagaaagactgctgggttactcccagcggtggcattaaggcaggtcaggtgatggaaggcaccacggcttagagaagtaaatggctcacaaatgacttaaaacagcgtctggcacaaaaggaagccctccataaatgtttgtgattgtggctataattacctagaaggcttggatcattccctgtatttgttttaagtctctctaatccctaggactgtgctgagcaatcaggacgatgtcggggggggggggtggattctggaagggtggaggcgaagccattctgggaactgtttttctctctgtgggtgaggatgagcgcacactctgacaggtttggctcacgcaccaggagctcgcatatagctacatatattagtctattcggaatgagacgtgaagaatattttctaaaccctggcagcatcctcgaactccagggaggttccctgagtgcctagggaatctgttgatgtggccacacagtgagcaccaggacatgtggcaccagtcctgactcagtttcctcgccttgcctctactggtcaggaaaatgcggatctctagcaaggacatgtgcaagtcattgctagagacatggaagttcccagatcgatgcaagcccgtgtgtggactgagtggagttgacttatatactgatgaacattggagtggagcctgagaaatgagtcaggtctgggaaagcttagtggcttcacttgtagacctcaaagtcgagattcgactatgatttaccagataggtggagtttcacgggagccctaacttgtgaacacattggccacctcatttatactaggaattccacaggggttttctaagagctaagtgagaaatgtgcctggtttctgggccaatcagtcaggaaaccaagccattaccttcattgtgggcgcatttttatttcagtcaagagggtccaacaagattgtgccggatggtgaatgtagctatgtgagcttaccaaattagttcatttctcattttaaaaaaatccatttgttccctttcccctgacagatgtgagttttggcaggatgtgtgccatgatctaccttcctaatgctgcaacttttaacccagctcctcctagagtggagacgccaaccataaaatagttcccattgctactttgtaacggtaattttgctactcttatggattgcaatttgtcttagtcagggtctctattcctgcacaaacatcatgaccaagaagcaagttggggaggaaagggtttattcggcttacacttccatgctgctgttcatcaccaaaggaagtcaagactggaactcaagcagatcagggagcaggagctgatgcagaggtcatggagggatgttctttactggcttgcctctcctggcttgctcagcctgccctcttatagatcccaagactaccagcccagagatggcaccacccacaaggggcctttcccccttgatcactaattgagaagatgccttacagctggatctcatggaggcatttcctcaactgaagctcctttctctgtggtaactccagctgtgtcaagttgacacaaaactagccagtacaattgaccccttgtcaacttgacacacaaacacatcactagtaagcctcaacccttacattcttattcatccccaaggtctaaacaactttaaacatcccacagtctttacatattcttaaaatttcaatctctttaaaatatccatctcttttaaaatccaaagtctttttacaattaaaagtctcttaactgtgggctccactaaaatagtttctaccttcaagagggaaaatatcagggcacagacacaatcaaaagcaaaaatcaatctccaaccgtccaatgtctgggatccaactcacaatcttctggactcctccaagggcttgggtcacttctccagccatgccctttttagcacacgtgtcgtcctctaggctccagatgcctgtactccactgctgctgctgctcttggtggtcatctcatggtactggcatctccaaaacactgcatgaccccttcagtcctgggccttcaattgcaactgcggctgcaccttcaccaatggccttccatggcctctcacagtgtcgagcctcagctgctctttgtgaccccttcatgccttcaaaaccagtaccacctgggtgacccttacatattaccaagtcctgctgcagcaggagtacaaacttggctatctctggaacacagcctctttgtgctttcagaaaacacttcccagaagacgtcacctcaacgatgctggtctcttcttaatcaccgctaatttcttagctccagctaaccagcatcaatagtcccagtaatgcaaagtttttgctttagtagttctggtatcttgttaatcacagctgattcttcagccccagctaaccagaactacagaatcttcataatcaaaacagaaatggccctgaaaagagtctttaatcttccctctgaaatttcacaaaccagacctccatcttctgcactgttctcaacattatcttccgagctcctatacaacatctgacagagctcttaacagcgaatggatcttcaagcccaaagttccaaagtccttccacagtcctccccaaaacatggtcaggttgtcacaggaataccccactctgctggtaccaatttgtcttagtcagggtctctattcctgcacaaacatcatgaccaagaagcaagttggggaggaaagggtttattcggcttacacttccatgctgctgttcatcaccaaaggaagtcaagactggaactcaagcagatcagggagcaggagctgatgcagaggtcatggagggatgttctttactggcttgcctccctggcttgctcagcctgctctcttatagatcccaagactaccagcccagagatggcaccacccacaaggggcctttcccccttgatcactaattgagaagatgccttacagctggatctcatggaggcatttcctcaactgaagctcctttctctgtggtaactccagctgtgtcaagttgacacaaaactagccagtacacaatataaatatctatggtttccaacagtcttgggtgaccctgtgagtgtctcttgacccccagaggcatcgtggcccacaggttgagaactgctgacagagagcactgcaggaattgacttaaccatctggtaattattagtgttggggtgagtctagaaccgcagcctccccagtgtcagctttcttcttgttccttcctggctgcattcttttatacttaaaaaaaaaataatgtgtgcatgtgtgtgtatacagttgtgcttgtgtgatgtgtgaatgttcttttatgtgagttcacccacgtcacaaaacttgtatggaggtcagagggcagccttttatgttgctccttaccttgtcctctttgcgaaagactttcccggtgagtaagccacaccagccacactagccctgatgtttctgatgacactctgtccctgtcccagctctctgtagtggatgctggaatgccggatgcagttatacagtgatgttattttaaagtgggttccagggagttgaatttgtgttacctggcttgcaggacacgtggcttatcactgagctatctctctagcccctatttacatcctcgcttcctgatgaaaccagtgagcgagtgagcgagcgagcattcgccacatcccggtgattccctcagagcaccaggacctgggcctggtcagtgccagtcctgtagaacaccaggacagcacagtgccttggcctggtgagtgctagttagacagcacactgcagggtagctggagagacgattctgtcagaaaggtgctgactacacaggcatgagtttgatcacccacacccatgtagaagttggatgtgggctttacttataatcctagtgtttggaagcagagacacaagagtcagacagctcaacggagtcagagagccccaattcccactgagagaccatgtctcagagtgcaaggtagggggcggctagagaaatggcttagtggttaagagcactggctgttcttccaaagaggctctgggtttgattttcaccatgcacataaccatctcttatccaagtcagatatctggcaccctcttctttctggtctccacgggcaacagacagtcacggcacatacacctatatgcaggcaaaatgttcatacgtgtacaataaaatttaaaaattaaaaaataaaatcaacctataaaatggtggcagctgaaaaacagttcacacagtcactctcttggctgcgtgtgtgtgtgtgtgtgtgtgtgtgtgtgtgtgtgtgcacatgatatgtgtattcacacaaacacttgtccctcacatctgcacataaacaaacaaaaaataagcaaacaaatatgctggaacgatgagcgatgtgctgacatggaagccatcactttcatctgatacgtttgttgtctgggctgctatagatctcagacgtcagtggtgagcctgtgtggggggctagtgctttgctttgtgtgagtgtgtgtgtgtgtgtgtatgaggggtggttggaagattccagaatgacctgtgtctgacttgggttcccaatttccatcttcccagaggtttcccgccagtccctggtctagtgattataaccacacagctaactgctttgaactgcagaccttttgtccaagtgctgctactgggaaatctcagataaaggataggtggtctgtggaacgaagaaaattcttacttcatttttttcccaatagcatctgagagctgcagtctgtccttagcacatcatggctactatgagtcatgtgcgcttttctgtaatagggccttggacaggcaaagtctttgcctaggaaatgataaacagtccaacaacaaagtacaggccagggtgctctgggtctccagttaagtcccaggcagacccagaaattaccacctcagccttcctagagtccccggttgagcagggagggagggactgccctgccctcactctgggtcaagcctgctgcagaagctcacagcccctccattttaagtagttccaagcaaggaaaaaaaagtgtcatggggatatccagacttgggcagataacagctctactcttacatcctagttattaacccataagatggggtagggagggtatggtttgccatcctgctcactcactggatgctgagccccttttaaatgtagtctgaataaaaacggggccccatgacttgttttgcccattagatagcattatctccacggagcaccaatccgtatctctttgtgccatgtgtggttttcacatacgggattttaataacctccatgctgcgctatgaatttataagcagagctgatggaggactggctccacgggactttattttttcattattactcttttgaaaaacggggctgtctcatttctgagcggcgctgacagccatggccgtgctgtggggagggacgcagctctcactgcagaaggggtcagcactttttgtggctgtctcctcctcattccctccgctaccccagtcctacacttagcagcctccattatgcctatgacactgggctctgggtggaatgatctcagagaagcctgcttcccaccccagcgctgggcttcatctatattcagagtcctgtttctgtgcctccttttaaacacgtttcccctccatatgatcctgcgtgttcaaggagcctccttggtagtggctaagatggcaggcttaagattatccagtccccagtcctggggaagcgtggcttgacagccaatcctttaaaaattgtctagatttcatcaactaatgatatcaataaaccttcaacccacgatagtgagctcgttcacggacacatttgcttggtgtttagcaccatggcgttggtgactgttcaaatgtttagtaactgttggtcagatgtcagacatcgtgtgggatgctagagtttctttgtgtttataaaaacaccatttgatcactttaatcaattatcagtgtttggctctgagacagaatctcatctcaccccttatacctgaagtcatcatccgatcccaggctagcctttcacttgaaaccatcatccgatcccaggctagctttgtgcgtgaagcagtcagtcatctgatcccaggctagccttacacttgaagcagtcatctgatcccaggctagccttgtgcttgaagcagtcagtcatctgacctcagttttctaagtgcttctcttacaggttgtgctacaacacatacccataattgttatcaagattaaagtttcagtataaagttacattttaggcatctttctaatagtacttaaatctcccctttccatttctctattaaacactcacatgaaaaacaattctgcaattttgtcagtaaatggacaatctaattctatcctcatcttatatattcggtcttcagacccatctctccttttcacggtgcccatttgaaggaatcggcttaaataaggaaaaccccacgagcctctcctcggcagctgtcatagcctttttcattacaaatccgagcctgttatagattgaatcctcctgactcaatacggttctttatctgaaatttcatattagccctcttggatgttaaagtaaaatgcaggttacaaaagcagtttttgaaaagtccaggatgggaagggtgtcaggggctaagcccttacatactcagtggcagactgtctgtagattcctggtaggaatctctggctaggtgtgtttttaaatgtgggtagatctacttgcatctatattcgacatatgtttgtgtggcctgggagctgagtacgcagagtatgtttgatgcctgactcttagctcagtagaaagttggaaatctgcgtgacccaagggctctgcattctgaagatgcctcacaagtcagtgcacttagactgtaagacatatgctctgaaaaatatcacatgctgtgcaaatgaagtgggcccgacttagcactgtgggtgacatgcagaaaccacactgttggtaaacacgtctgagcctttaacctgtgttgttggcacggtgcatctagctggacattatgaatttcagaatgctgactgaatgcctgctgggtcctgggtgctgttacatgtgtgtttttgttaccagaagtatggggtttggtgggagactgacagacaagtcagtggagttatagatcatgagtgggcttccatgaaggtcaaatgtgagtttctttgaagggcctgacttgagtgtcataggtggtcagtgaagacttcctgaggaagctgaagggacattcctggaaatggggggaagctgaagggacattcctggaaatgggaggaagctgaagggacattcctggaaatgggaggaagctgaagggacattcctggaaatgggaggaagctgaagggacattcctggaaatgggaggaagctgaagggacattcctggaaatgggaggaagctgaagagacattcctggaaatgggaggaagctgaagggacattcctggaaatgggaggaagcggaagggacatttctggaaatgggaggaagctgaagggacattcctggaaatgggaggaagctgaagggacattcctggaaatgggaggaagctgaagggacattcctggaaatgggagggggaagagagtgcagaagaatgtccccaggctttcagctgaggacagaatatggcgtgaccgaaaaccctcaagaaactaagtgtgctttgtgtatactgactgtgaccaagagagtatgggactaaggggactgaagccacttgaagagggagctggcctctgccagcactcttgtgcatgcaaacacactcacatatgcacacatacacatacactcacacatacacacaaacttatatacacacttttatacacactcacacatacacacatgcactcactctcacatacactcacacacacacacactcacacacacacactctcatacacacactctcacacattcacacatacatacacataaacccacacatattcatatatacacattcacactctcacatacacacacatactcatacatataacacttacacttatgcatacacacacacacacacaacctgaaacaataaaaaattatttacatgtgtttgtgagagacagtttgtgcctctgacttcagcttgctgggcttggttgcttgtgttcttgcactgtctgggccccagggatcagactcagaaggtgaaggtgatcaccttcagctactgagccatactgtgggcctagtttgtgtgttttcacctaagttatttgatgtagaagaagagacgaggcgtgtccacactttggggagctaaggcgaagggcccaactgccagccggctccgtgcatttgctttgtgcatttgatttacttctctgcttctgcggcatttgcacactcagccttagctctctgttccgtttattaagaatgcacgtaacttaatttctcctaacaccgagtgatttaacccagctgggtagttgctttccccaccatgaataatctgctagcgttctgcatcagtgtagctcagtgacctgtaaccccattccctcaacacaaactcagttatgcatatgattcttattttaaggggctttgatagattcccctgagctctcttatttataggaacaatttgtgatttatggtggttctatggtcttttatttatgtgtttgctttggtagagccaactttcattccaatgcatacttcttgagtatacatgggctttggatacacacactgctccacataaataaacgtgcatgattccataaattttgaagctattattatcttttctcttcaagataactttagaaataaaaggtattgatccagtgagagtgaccttgacattagctaatagagatggttgacccctctacaccattgatatgctattggtgactaaatgcttttctcataggatccttttcgattcccaagcttggctaatggtctctgtgacctctgccccagttatccagcttttagtaataagcaatagagcacaaaagaatctctgcagagaagatggctgcctctcaagggctcttggctcctaagactaactgttggtggctttgtcagagctcagaggagccaggctgctgagacctgaaaggctgagagggctttgccaactcaaaatgattgtgtgccttacagcgcctcagtgccagggctccgtgtgccaaggaaacaaaaacttgcctagaaaataaacccgtttcttttgcctcattctcttgtcgaagaagccaaacctgtatgtcttagttaaggtctctgttgctgtgataaaaaccatgaccaacaacagtgtggggaggaaagggcttattttatcttacattctcaggtaaccctccgtctgtgaggaaagttggggcaaggactcagggactgtgcagaggccatagaggagcatattggcttgcttcccctagcttacacaccctgtttttgaatacagcccaggaccacctgcccagggggtagcactgccaacctgtgagctggatcctccaacatcagtcattaagagaaaatgtcccaaagactttctcacaggtcaatctgttgggggcattttctcagctaaagttcttctcaggtgactcttgacttgtgtcaagttgaaaaggaaaatctaatcaggtcactgtaatcatcaaaatatccatcctatttaaaaaagtgaccagcagctggtctcttcagcgcttgcataaacactgcttaagtaacagggccttgtctcattggaaacataatgctatgacttcacacatacagcaagatggctccacacctagcgaacccctgaaggtgcaaggctttattctggctcagggttcacagggatgcagcctccctcccccccccccccccccagctctcttctttcttagctctcttctttcttaccgtgtgtttcttttgaatctgtcttgtttcttcactgggatgtttttccccatctgattttcctcagatgagatgaatataaaagagaggcatgaatgtgggatcacatgtaattcaagacaaatttacatttaatacaatcctccctgctctgaaaagataatctcttgagaaaaactcagacaaaacccaaacacaggaaaaaaaaaaaaaaaaaaaacctcaacatggtgtgtaggaaacctaatatcgttatacccactgttttgttgtttataggaatttctttctttttaaaaaatgtcttgtgtatatgtgtgtggctgggtatgtgcatgtgcacacatgcatgcaatgcccagggaagccagacggaggcctcatgacagcacccccccccccaagctgaagttccaggcagatgcggtttgggtactgggaattgaacctaggtcctgtggatggcagcttgttaccctttagccctctctctagatctcctttatttctttggctcatgggttcctcagccagtttggactggatcactctgtcaggggatggtggggggaaggggtgttggctatagggactttaatagcatccttggctactgcttattaaattcagtcagtgttcaccaattgtaacagtcaaaatctcagaaggctgacaagatggcacttgtcaccaagcctggattatctaagtgagattcctcagaactcacaggttggtagggagaagggctgtctctaggcctttgacctccacatttatgctgtggtaacacaccctcatacacatacatatacacacaagcatttacatgcacacacacatgtacacatgcatgcacacacatatgcatacattcacacatgaacacatatacatacttatacacacacatacacatacaagtgcacacacatcatacacatgcatacatgtacatatacagacactcacatacacacatgtatgcacacacacatacaaatatacatacatgcatgtaaacagacatatatgcaaacacaagctcatacatgcacaaacacacacatgcacatgcacgcacactcacacaggcacacacacacaaatcactaagtagactactgtttaaaagtctgcagacattgttcagtgtttcctagggggtagaaccatcccaggtgataacagcaatttcagactcacatacttgcaagaagctgaattaaccaattgtgcagtaagcatggtatccttttctttctcccaactcatctcattattcccattagcattcacatctcaaagctaatgtccaatgctggtgaagtctgaaaagttggaaagtaaacatctccctctttatttgctaagttgtccagcaatgaaaatctcccagttggagagcctgttaagatgtattctgtcagatgaaaagggctattttaataactcattatcattcttagcatggaccttttattttagaaaaaatagataattagcattttggcttatcgctttctcttcatgaatacaaataatttgatagacagacaaccaagagagacttcattaaataatgggcctgaccagctggggatgggagtaaattagaggttagaattcagcctgggagttggaacttggggtttggtgacagtgtcattcattatccagtatgtttttgttgactgacctgatgctgcagcccagaaaccgagagcacgtgtcagctggtgagaaatcagaggctgaactcagctcggggagctgttggccacactgcatttaacctgcagctggccgaggcagcaccacaaggcctgcgctgtcctgacgtctagctgtcagcccattattaatgtggacatgctagaacttcttccagagaaggagcctggtcctcaagtcgttttctcccgttcattacacaccccaccgctatgggtggtctccgaaggggacgctcatagtcttaaaataagaccaactaacatccaaccaagattccatcctgaagttagcttcctctgaaatattttagaatagtttatcttttggaagataccaaatgctgtgttgcggaacaacctagaagtgccttgcatggagacgagacaggtcaccactggtagactgtccccaactgtcttttgaagcttgtcggtcagacttgagaactgtgttcccagtgttttcttggtgtgtcttctgtcggggagtggagtgggagggttagatctgaggcatgattctcgccatgagttgggagaaaaacttgattcgcaattcctcctctacattcattatcctgctctgtgtacccaaagcagcccctgatgtctcccccttgacgttttcctgagcagcatcttcccatgaagtagacttatgccagaaagacaaatgaaggtatcaagcgcatgatgtgttcccagacacatttggctttattgctaacatttcctaagaaaaataactgagagctgaacctgaaacggagcaatttagttcaccgtgttgataccccgtgctggagacggagaggccccatttgcccttataaaaacgttatgagtgcttatgttcataatagtgcagttcattattgatcaataccttacaactgagaggtgtagaccgacccacattgctgtagggcttgtgtgtgtgtagtaaccttagtgaggacccagtggggagggatagagactagcatgcacaccgtaggaactgacattctgggtggagagccctgctcccagttgctaagatatattgacaaggcttacgttgtattcaattttattttagattgttatgctcagatacaaagcccactcataggtaaccgagaaatgggtgtgaaagataaaagtatttgggaaatctgtgtcaaaacacatgtgtagggagggagtggcaaagtggggtttgaccaggcctgatggcagagtggggtttgaccaggcctgatggcagagtgggatttgaccaggcctgatggcagagtggggtttgacaaggtttgatggcagagtggggtttgaccaggtctgatggcagagtgggatttgaccaggcctgatggcagagtggggtttgaccaggcctgatggcagagtggggtttgacaaggtttgatggcagagtggggtttgaccaggtctgatggcagagtgggatttgaccaggtctgatggcagagtggggtttgacaaggtttgatggcagagtggggtttgaccaggtctgatggcagaatcagctcttggtttgattccagtgtgttgcttgaggctggtcatgagctttgcatcaccctgacaagtattggagagacacagtttttaaaagcttgattttgtgctcacaggcttagaggtttcagactgtcttggttaggttactactgctgtggtagacattatgaggctttgttttctagatggggttcttctttccagattactatagcttgtgtcaaggtgaccaaaaaatgtaaccaggatactgcccatgacaaggtaacttccatacttgggcatgtggtagacatcctggcagagacatacagaaagggaagaacattgtttggggtgtcatgtgacttgaggtgggtagagcagtgtagagggccagagcactgtggagtggggggatgaccatgaaggtagaggagcatcatggagatgggagcatggtggagatgggagtggtgcaggtggggagcatcctgacaggagcagctttgtgacaggggcagcatcctgacagggggaatatcctgacagggaagcatcctgacagggggagcatcctgacaggggagcatcctgacagggggagcatcctgacagggggagcatcctgacaggggagcatcctgacagggggagcatcctgacaggggagcatcctgataggtaaacatcctgacaggggagcatcctgacaggggagcatcctgacaggtaaacatcctgacaggaaagcatcttgataggggagcatcctgacagggggaacatcctgacaggggatcatcctgacaggtaaacatcctgacagggaagtatcctgacagggggagcatcctgacagggggagcatcctgacaggggagcatcctgacagggggaaggaacatcctgacaggggatcatcctgacaggtaaacatcctgacagggaagtatcctgacagggggagcatcctgacaggggagcatcctgacagggggagcatcctgacagggggagcatcctgacaggggagcatcctgataggtaaacatcctgacaggggagcatcctgacaggggagcatcctgacaggtaaacatcctgacaggaaagcatcttgataggggagcatcctgacagggggaacatcctgacaggggatcatcctgacaggtaaacatcctgacagggaagtatcctgacagggggagcatcctgacaggggatcatcctgacaggtaaacatcctgacagggaagcatcctgacagggggagcatcctgacaggggagcatgctgacaggggaacatcctgacaggggagcatcctgacaggggaacatcctgacaggggagcatcctgacaggtaaacatcctgacagggaagcatcctgacagggaagcatcctgacagggggagcatcctgacagagaagcatcctgacagggggagcatcctgacaggggagcatcctgacaggggagcatcctgacaggggagcatcctgacaggggaacatcctgacaggggagcatcctgacaggggagcatcctgacagggggagcatcctgacaggggaacattctgacagaggaacatcctgacagggggagcatcctgacaggggagcatgctgacagggggagcatcctgacaggggagcatcctgacagaggaacatcctgacaggggagcatcctgacaggggtgcatcctgaagggggaatatcctgacagggcagcatcctgacaggggaacatcctgacaaaggagcatcctgacagggggagcatcctggcatcctgacaggggagcatcctgacaggcaacatcctgacagaaacacatgccagagcagcacttggccaggaagtgacacaaggaaagaactgggcttccacagtgcccttcagtgacctgaagaccccacactagtcctcccttaaagctcctcccacagatgccacttggaagccatcacttttagtgttgctcatttgaggatggctatttatcaagcacattggcgaactgatttgatgaaactcttcccaagatgttaagtcacgtgagctgcgctggaagtgtgtggggtgaagtgctgaagggttttgatatcaagatttattctctgtgactcacatttttatgttaagctgtcaacatcatggtattaattgcttctattttaaagcccagtcttcataatttaaccaacattaggaagtatatacttttggctcctaaaagataaattgtgtagtcacaccatgctgaacttcctattctctgtactaaatgaacatgtggctgaaataatcccaagattggaactgtcgcctgtgctccgcctgaacctttaggcttcagaattagtgacaattacatattaggaatagagaacagtagacacacacccacatccactccaccccacacacaaacacacatgtacacatacatgtacacatgcacacatttgaataaaaagtaaagcatttggtcaagatagaaaacctgggtttgttccctggaccctccatggtggagagagccaatttcctcaagttgtcttctgacttctacatgttctatggcacatgggaccacatacacatgcacaaataaaatataattaaaaaatggaatgaggcttgcttgcatgttgaattgacttgactttggctttttatgaccattggtcaagcgtaagaaagggcataccctctttcctgtctgctttctccctctggtatgttttgtaaagacaatgatatgttttgtagagtgcagtatgacagtatggtgtagtgggagagggtacctcagtgggcccatgctgaggcatccctcccccatgaggtaccagccataggacaggtctagcatagaatagagtttattttgggccatgagaaggggagttgagaagggagtagaggtagaaaaagagagggcacaggaaaggacagagagaaagagaaggagagaatgagaggaagaggaagaggaaaggaagaggctggacaggaacaggtggagagaaaggggagggagaaagataaaaagagttagagagatgaaaaggtcagagaaagggaagagaggccaaacagtccattttataacaagctaggtctacctggctgttgctaggtaactgttaggcggagcttagaaggcatgcttttcttcttccttctctctccgtctcccactcttccatctgaagtcacacagcatccagggctggagacatcccactgttgctccgtatcaacctcccacgggagtcataaaattaagacccataactttttaggagattgtctgttgttttggacccagcttctatacaagtcctgggcagtcctgagaccagtctaagttgatactgtgttaggtgcctcagtaaaattgaagtcataaaatggacaattaaaacaagaaaaaagatagtttcagtacagtcaacccagggggcaagtcagcaaggccaggcatagaagttccctcccagctttcatggggaaggcaagtggctttgaaatggttgatgcagagttccacatatcccaggaaagtcttaggctcacttttttagccaaggatagccttaagcttcttcctctgccacttccagggaattacacagggaaccacgcctggtcaggaggtgacacttgtggatcaaagggcgtgagagcatcgagccaactgagtgaggtcctcagtctgggtcctttcaccattgctcgctgtttctgccttcattagccttttctgtctataaagccaccctatctgcctagctctgtggagcccacttttgctttaggatgtaatggtattggctcacgaattgccaattcccagctcctcagcactcgccttgcattcagttctttaattaatgcccccattgctcatcagaatcatcacatgacactcatgagtaactttgagttcccaagagttttggagatcagatccaagaaagcccctggtgtggttggaatgtgtcccacagggttaggaactgaatcctcctaacatggatgttaaatggaaggacttctgatgactgcttccccactgcttagtgggagatggctgtggttggaatagatacatgataaaggaggagtttgctccctaagtctgatctgtgggtgcagagtcatagctttcctgcccctttacctctgccaggagatgaagcaaacagtaagggttaaatggtcagtggtgggtgactcagccttagcctccacagggaacagtgggaagcattgggatgtatgtgtctcaggcaaaggatggaagtgccctgtaactgctctcaaggctgagagtatgcacagtgtatgagttcaattgccctgtgcataaccagcttttaatttcattttgggtcttctaaactctgagtagaatctccagtttgtctagtttctggcaatattcagttttagctaattgatatgcttttcatggtcacagagactgcgcattttagaacaccacttcattaaagcattaaaaatactgtgggctcggtaatttcatttactgggtcagtaacccatgatatctaggagaagatttaacatagttttaaaataattattcaaacaagataaggatttcaaactataattaccacaccagtaaaggagctggggactccaaagccagataaatattatatctaaatcttagttctagttcttaaaactcacagggctttcactcatctgatagtacagatcatgagaatcttctcattttcagcatgcagatagcctgggcatagacattaaagtttttgcttaagaagcacaaaggcatttgcaataaacatgcagaacaaacgccctgctgtggtctctccagctcctccatacagttctcctgcagccttcctgtctaggagtttatatttttgttgatactatacattatatttccccctctcttttaactgatgtcctgttagtgagtttgtctaaccataccacattcagctagctaccgttttataaactcgtagtgattctttgcttttctcccagcctattgcatttgtatctatggaagctgtatggggatggctttctttttattttgattttacgtcaatatctttctttcttcactcagtggcctggctttcttggtttctcagtactattaacaaaatgtgtgcatcagaattccgtagttatcgtctaaaacattgtctcttgttttcctgtgaagtgggaagggagagcctccggatccattcctgaaatcagcccgtggataaacttcacatgggatggactttcatcctggtacaggaggaggctaacagtgggtatcagatacactggaacagggactatggatgcttttaacctgtcatgtgggtgctgggaactgaattccagacctcggcaagagcagtcaagtgctcttcactgctgagccatctctccatcccttcactgttattccatatgtttacatagtctgtatatatatatctgcacatatatgttacataatcacttcccacagcagtgagtaagggtccccctcccctctccctgcatccttgacaccattgctatttattccttattgacaaatgatttcctggtcattacactctgtggtggccatttctatttattccttattgatgagtgatttcctggtcattttagactgtagtggccattgctgtttattccttattgatgagcgatcccctgtcattacgctgtggtggcatattgaacatctttgtccctagccgagagcaacatgctctgatagacactgagaacatgctctgacactgagaccatgcgtgtaccagttttcttgctctctgtgaagagtctggattgtgtattagagcgaatcctgagttatcttcctggagggagaggaagagatccatagggaggttgcctctgaagctggcccctgctcagtgtttcctagttgtaatagtagacgatgagttatgtcgcttagccagggcctcggtgggaatcttgcgtttgagaagactcttctttgcctcccctggtggaggtagcaggctccttttgcagcatgcctcaggattatacaagtctgtacctttgaggaccttcaattaaagggaaatatgtcaactatggcagccgagagcacagctttgtgttggctgtggtagaattatttcttgacattaacagttttatgcagccccatattaagttttatgtctcgatataatgccaccaggtagaaaccaaagcaaatgccacatcccaaatccagagagagttggagccaaacagcgggttatcaaatctgtatctttatgtgctgttcctcgtcacgggtgatttaaacccacagctctggaagctgcaggagctgtatggtgcagctttgaggagggacgaggaaccgagcctggcagcctggcttggctgagcggatttctccctagaacaatcttctcagttcttggcacactgaggttactcaaagaagatggaaacagcttgcttaatcactcctgaaacaagggaagaagaattaaaatacatttttttagtttgtcaagcaatgaaaacaatgccagcttgttaatgcgtctcttgtaccctcccttgaagggccttaaagaacacggaggaggggaaaggcagaatctattccctgatggcgtcattatttgtgtgtggtgtggcttctaagactaaaactctagagatgtgaagccgtaaatgacagcagaaagagagattgtccccagggcttgtcctacgtgctttgttctgattcattcaaattggttgatgaaagcaaaggtctcatttgtctcaacattaaagtagtaaattagcagtcatctggtccctaattgtcctggaagacactgaaggtgcagtagggccctgtctccccatcttaatatcacgttgcttcagctgaaatgaagcaactattagggttgtgcaaagcagtgcttttaataatttaggctgctggttagattcaagcatgaagggcttttggtttttttgttctttgtcctgaaatatttatcgaagctcctgtttttatttgatgtggacaagtttcctttcaggttccaagctgtaaatggaaattcctatccagcacggggctgaggtagagagcggggtgagagttctctccgagtctcttccctaccatctctgcctgctgctaggccccggcgttcacagcattggtcaaatttcctttagttccttggtgaccttttctaatcctgactgtttcataatttaatgttttgacctttgttttccactgagcgatgttagtgatgtatgcagagatttaatgactggaagtcgctgacaggtgacctttcatccatgactattcctttttgctggggaaaccacactggtttgtaggttttatttcacagattttaattgtctgtaagcttgttcggagggaaaagagtaaaggttaagtatttcattcttcatactgattaaaatgtaaaagggctggcagttgtcccaatctatcattcaaaaagggtagagcaatccgcccagctcacactgggagaagagtgatggaactttccagaagggttggtgaggaggatgaaaggaaacctagaaaagtgagatagcctacagtgagctagcccacccacctggatgaagacagcaggggtgtcctgtgtgtgcacactcatgtgaagtgagctagcccactcacctgggtgaagacagcaggtatgtcctgtgtgtgcacactcatgtgaagtgagctagcccacccacctgggtgaagacagcaggggtgtcctgtgtgtgcatactcatgtgaaatgagctagcccacccacctgggtgaagacatcaggtgtgtcctgtgtgtgcacactcatgtgaagtgagctagcccacccacctgggtgaagacagcaggtatgtcctgtgtgtgcacactcatgtaaggtttggtgtaggcaggcaggagcagggaagtggaagggttaactgaaagagaaaagctgctctttacaggtaaaatgccagtaagggcaagtgacctattagcttcccttcttccctctctccgtccctaacccctccctcccttacttctctccatttcttcctgttttccctttcttacttctgtcacctctcttcttcccttccttcccttcccctccgcttccattttaaccaagcgaggatccacttggaaatgcattggtaaagtgacgtctcaagtctccatactcgatgcacattgtataaactcagggagccaaggctgcttattacagcaccctgaactcacagagatagaagaacacgcatgccatgcctccctctcacctttctagagcctggggccttctcagggaatttcttcgcctgtgcttgcagtcttctgcttttaaaaagcaacccagttttgtgcctgtcacatacacatgcttttaatacaggaaggaaaccggaaatacacatgctgataagccttcagtgtaagaagggcatcttcgtgtctggaggagggagtgactcccgagttagagaataacttgaccagttagccacctgcctgtctgaagagggtgcacaggagggaagctttgggaaagggagggattcctagtggtgatggagaacagtttccagcatcatcatctcctgccatgctttttgtttctctcccagccaaaaagaaatggcttgaaagaaaattgtgtaaagagatgtaaaggaccatccaaaacagaataaagtgctcgtgactagtttatgacggattagaattttagccatattagaaatggaaaatgggaaggaaaaagattccatctaagtatttttaacatttaagggctattgcaggagaagagaagttgcttccttcataagcacgccccagagaatccctggggaattctccatccccttggcagggcgtgggagaggatgagacgcaggccacaactctgcctcacttccaggaaactcttgcctggcaacgcattctgtgtgtgtgtgtgtgtgtgtgtgtgtgtgtgtgtgtgtgagagagagagagagagagagagagagagagagagagagagagagagagagagagagagtttgtgcctacgtgcatctctgtgtacacgtgggtgcatgttccagcatgtacctgttgaggaagtatgcatttctgtgtgtgtgcatgtgtgtagacaccaaagtttccccttgggtggagttcctagggagctgtccaccttgttctgaggcggactctcccagtctgattgtcttggaacttaacatgtattctaggccagctattaagctcagggactcacctcaggtcacttccctggcattggacataggtctctacatctactttcttactgtctgtgtcattctagggaatcaactcagtgcttcatgcttgcattgcaagcactttagcaggcaagcttgctctcctgccccatgagtgagtagtttttaacatagtgctgagtgagattagaacatatatgtatgtgatgattatgccatatgatagttattgtattaatcaattatattaatctataggatatactaatgcctcatttcttggtactgctgtgagcataactcacgacacacaacgcatgcctctttttgtattaagaaagctatctactatccattggacatcttgatttattcaattttataacagagaatgaaaatcaactaaataaaaaggaaatctatttttagggactgcttgttgaatcctagcacttaggaagaaatgtctgaagaatttctctcactttgaagctaacctggtctatagagagttcttagccagctagggctgcatagctatctctgtctcaaaacaaaatgtctgttttcaaatcttggcatcactatggccattctcaggcctgtcttccgataacccaggggacagaggcaggaggattgctgtaagttcaaggccagctgggtctacacaatgagttccaagttaaccaaggctacatagtaacacactgcctgaaaaacaaacaagtcaacagactaaaacacccattttgaagatcaagtttgattaacctaataaatgctgaagagatggcctgaatcatgacaggcatcagtcatggccaggatgggcagttctatccaaaggcctgaattgtgacaggtgtcagtcacagctaggatggacagctgtgctcatatattctcagactgatttcttcttgtgggctcatctgcctcctctgccccattcaacaatgaagaaataattcttccttgtagaagacgaaataccaaggatcattttggtgggagatgtcttgcttttccaggcaagcccttaggcctctgacacagcctgggatggatgcagcagactacaggacttcccacacacatcagagctgggtacggagattaaagtttaccctgattagaactcaaaatgatcagtccttcagagcaccttatacagaatagccccatgaagaaatcatttggttgtcctgtagatgtcaccaaactaaactgttgcccaactgagtgtttattgctaagtataatggcgtggagttgatatagttttgcaagaggaggaaatgcctaaaacaaatataggtttgcagatattttataagtcagtattttagatctcaaataaagtgtttggcatgtgtgggttttttttctgtatgtgtgtgtgtgtgtgtgtgtgtgtgtgtgtgtgtgagagagagagagagagagagacagacagacagacagacagacagacagggcaaggaggctggagctcaccaagtgggctaagcctgtgagctctgtgaatgtgcctgcttctgtgtcttcagtgctgagattacaggcatgtatcaccaagcctatcatttttaatcgtttacattaatcccagaatattaaactccaagcaagcacttcacccttcccccactcgtgggttttctttaacagcagtatagctgccagacagggattagttaaatttatctggtgttcttcacccaagcaaaagattctaaaagatgttctgatacaggaaacaaaatccaagggtgtattatttttaatggaaaaaaaaaagtagagatgattcaactgaaaagaatttgaaattaagatgaaggttgatgaattggaccagataagtcttaacagacaaatccaggctctcgatctaggaagagagaggcactgattactgaggtggaacaaagccacggagacgtgtgtactacatttgtgctcaaccctcccaaatcaaacacgaacgagcagagaagcagcaatgccttaacaaagaaagctgagatcaaaagacatggggacagagctaataaaagagatagggatgaccaggcgaggcaggtcttgactggccaacaacgagtacgtggcctcttctttcctttcatcatggatcgtagtagtttgacggttccttcaaacacatggatgcatcccggacatcattccaagtcttctggcagcttggagcgtccgattctgatttggaaggtgttacatattagctcctgttcttctgccattctgctctggccagtggagctccgagcacgtgcctcgcctaggagtcagcgagctaggattggggccaatgacgcaccagaggaagtctctaaagactctagtcagggtgacgcagtcatccagtcaacagtgaaaagatgtggttagtaaaaacatcatctacaaccaaagctactgcagagaaagccctgttctccttcccgcacatatttttcacataaacaacaaactgttggccccactgttggcccttgagttgttagtcagctgctgacctcataatctgcacagctgtggcttcccagcgttgtcatggaacagattgggatgtctaaatggatcactttcagaggttacaattgtcaagtgagaccagcctgctgattcttattagctaaatgaagccgtgttacagcagaactggctaattcattctaatggctgggaaatccaatgcaaattgtcacattttacaggacacattcaaagcttttcttgatgatttttacctctgtgcaggctgtaccccaaatatggttttattgcccacttaaggaccttgttgggatgaacagtgggatgtgatcacgctgcccgtgtgcacggtggtggtgtcagagcaaaccacgcaacattcggtgtgtaatagacacgatgagcatgattcacgatggttgtaggtaatgcctgagtaatggctgtcaagccctaccaaaaattgaaaaagatcgtacttgtccatgctgtctgaaagagtgttggcttctaaaggacaaagaaataccttagaccacacctgatccccaaagtcaatctcttgagcctttatttaagaaaatgtttgtggtagagctggtctagaacctatgttcacgagtcctaatgtattcctccactttggacttccgctaacttggtagctgatcttcgtgctgcttgctgcagcttgtcaaggtgatatgcaagttcttttctcacacttgtttgtgtggtagtgcaacagatatcccagactagcctcaggctctctagatcaccaggatgaccttgaactcatggtcctcctgcctctgcttctcaaatgcttggattgcaatatctgtcaccatgcctgttgaccacaaaggtatttataaaaaaatgtgtatttttattgtatctgtgtgcgtgcatgcatcttagaagtataccatgtgcatgccaagtgcccacagaggccaaaatcaggtacaggaccccatggaaccagagatccagatgattgatccactctgtgggtgctgagcactgagtgactgctcctatgggtgctgaacaccaagtcggtgctctatgcaagagcaagaagcacttggggtagctgagccattcatctctgcagcccgattgtagtgctttaaggcatctcacaaatggattcgtgggagtctaaccggtcgtgctttttctgattcttagttgtgacaacatacacggatgcctttgccagcgtgtgcatgctacagcagtaaagaaaccaaaggaaacaagtttatcaaacacagtgactgttggctccaaaatactccaggatgtacaaggatgtttatcaaagtatttgtaaatggtagaaaataaatcaggcaatagctggatttccagagtgagcagatatatacattatggcatatatatgtagttgagcaatgaacaggtactaaaatcttccctaaggattatttactgatatgggaaagaccaacacgaaaacaaaaggaaaccaaagatgcctagttgggtaaatctaattttttacacaacagcccacatagataaaggacaatgtggtgaaatatgtgtgatcattgttgagtgatagaaatctgaataactttaactatcctttttaaattttttaagtttttcatagtgagtccatacttctttaataatcatggtaggacaactctttaaagcagtttgagtagatttgttaagagtcatactgtagtggtctttgcttcaggcatcatccccctgcctaccttttaaacagactcttggttttcccccctggttttattcctagaaaccttcctctcatcctagctggaagctgtgctagtctggagtggctgtggcagaagcctgacataactcttcactcgtctcccctcgcaccagcttttcacacattcagtacctggaccaacccagaatatacccagaagtttgtcggcctctctgctttcccgtaccacctcctgtcttctcatcacgctctcttctctgtgggagcagtcacttgctctctctgtttcaaccttcttctcttatgctccgactttccatgtaacagacaaagttgttaagacacagttcaggtcatccatttctcttttgtcaaagctctccactgcacaggaagccagaggatgcaagtaatgcccagaggcctcctttctgcacccagtgcctgcttggtgtctgcatgggctctgctgagtgcttctttcttcatcgccatctcctgcctaaaggatcagcagcagtagctttgcattgccacccacactggagttggccttggtgatgtctttgagtcatttccacccagtaacccttcatggctagtgattttacctccctcgtacactctctcagcagtgcctttctgacatttcttcattgctcccagtgcacacacagacacattcacatgcacacacactatatgcacacacagacacattcacatgcacacacactatatgcacacacagacacattcacatgcacacacactatatgcacacacagacacattcacatgcacacagacacacttacatgaacacacagacacacatacacaaacagacacactcacatgcacacacagacacactcacatacacgtgcgcacctccgaagtttccatgttgcataaatttcttttgtgaactgatcaccgtctaatatattgtgcaggatgctggcatatttattgtgtgcatgtatagaagtacaacttaaatgtgcatttcattccatcaggaattcttgtgtatgatttcttacctcagctgtaactcttggaactgtacctgctgtgtggtaggcacccagaaactgctgggcagagtgccagcaacaggaaaggtgaccaatggccactgtgtggtgattgtccaagtgacttttctgagttgcttcacctgccattttttccttagcttgattgccacagctggcctgagcctgctgagtagctgacctttcctcttgattgcgtttctcttcccacctaaatcaacagttccaaactaaagggggaagtctgtttcttcctagtatttagctcagttttcagactttttttaaaaaaattacttcttagagagtgtcatgtgtatttcaactgtatttaccctcacccccaactattcctaggtccccttctctttcctgtccatccctagcaatacaaacaggaggtggggggggggggcagttttccttaagagtatatcctggcaaatcaagtggaagaccatacatctgagaatatttgggtaccacaaattggtctctaaggatttttttaaaggatataaagtgttcagactcttaactgattgttttaaactgatgtctttaattttctactttaacaaattgagctgctactgcatccctgttgaagtcagaggcaggcactatcttacaggagttcagtgtcccgatggcacatagtgcaggagtgaacgaggggcaggaccctgtatggatgaccctcttctccagtaggtgcaaaatatatttgggttcaagctcagaaccaaaaccatgtaatcttatggtggatgagaaggatgaatatcgcctaagtgtttctttttctgttttgaagatggagtaatgtcttcctgtgggaaagaagtagcaaaagttatgtgtgtggttattttagaagccaaggaaacaggatgctgctagtagcagtgagcccttagtgtgagttagaagattgatatttaggggactaacagatggcttagaggtctagaatgtgtactgctcgtgcaggggaccttagcttggttcccagtgcctagatcaggtatgttacaacagcctataagcactgagaggatcttatcccttctcttggtcaccataggcatttgcatgaatatattcacatatagagagagacacacgtatacataaatactaaagaaataataaaataaatctaaaatgaaggaactctagacttagaagatatagaagttgtaattcggaagatccagatttcaaaggcgagggcttggctcaaccgctgggactggtattaactaatcaccctggacatcagtgttttgctcccaagtcttcgttagttccatgcagacatattcagcctctaacaactgcatgcgtgttctctccatgttctcaagagaggccttaccttgtccatgtaaaaccaacataagcccagaggcacattaataggatgacttgggggacttttaaacatcagcataagactcgggctgttttaagtgggtctcgtctgtgtcctcttcatagtattatcagctgccacctactctttgcatacatagcaccaaagttcaaaatgcatgacttggtatataccactggagtttcttttatagccactgtccttatcctagaaatagcttcatactttcttatcactggaaactatggttctaaatgtataaacctcctcatttagagagaaaaggcatgactgcttctccacatgattttgaactaacatagggatgcagacagtcaagtcatctttccaacaggatgtatttacttttctaataacagcacaggtccaataaaggctacacctgtagcagagactgtagaatagagatgtgtcagtgataactccacactcattcattgtacactaatgacattttgattcctcaagcactcatgggaccacactcttcatttttctctttttcagcctttgcaactgaactgtaaccactgtgccatcgtgtcaaattcaggtcaaatggtcgggcagaaggtgggggaagagatagaccatgcatcctgcatctggagaatgaacaacgccccaaccaagggctttgaggaagatgtcggctacatgacaatggtccgagttgtgtcacataccagtgtccctctcttgctgaaaaatcctgactattttttcaaagaagcaagcaggaccatttatgttatctggggccctttccgcaacatgaggaaggatggtaatggcatcgtgtacaacatgttaaagaagacagttgatgcctatccagatgcgcagatctacgtgaccacagagcagcagatgactcactgcgatagagtgtttaaggatgagactggaaaggacaggtgagtcctctcaaacagcctagtcgacttttactgtcttttatggtgcatcttagccgagtccctctgccggctgtcaagtgaacggagttattttttaaatagaccactcagtgtttctgatcattatgattacgtcatgagccaacacagaggtcccatcgattctgccttctgttctctccattttaataggtttgaggctctgagaaatggtggatagttctctaggatgtctttaggtctcttcctatgtagctcagtttgatattgattaaattggatttttgttttggagaagtcttcactacagaaatactcaggaatttcaggattttaacgcatgaaaattgtggctccttctcccctctgagacgagagatagaacagactattgaccgcctagtgattgcacagcttcatacataccctgtgttcttgaatgctgcacattagtatccaatacactaaccagaatattgtattgaacttatgtattactggggctggagaaatggcttgatggttaagagtactgactgtccttccagaggtcctgagttcaattcccagcagctacttggtggctcacaaccatttgtaatgggatcagatgctcttttctagtgtgtctgaagacagcaatcttcacacacataagataaataatcttttttaaaaaaggaaattatatactacttaaaaaccatcaggattaggattcttttttttaaaatattttttattacgtatttttttcaattacatttccaatgctatcccaaaagtcccccataccctccccccccacttccctacccacccattcccatttttttggctctggcgttcctctgtactggggcatatacagtttgcgtgtccaatgggcctctctttccagtgatggccgactaggccatcttttgatacatatgcagctagagtcaagagctcaggagtactggttagttcataatgttgttaaagagatatacagtataaatacccttcacccatttatctaaaacccaaatttcctttgtgtgtgtgtgtgtatgctttcctgtcctggaccctgtcccgactcccttttcttgaaccttcctctcattcctcccttcccccatcttcctcttcctctcctagctccttcatagccaagcctctcaggcagctctatcatctgctggtttttctgtctctttacaaagacagccagcacaagtgggggaagcaaaatgacaaaccgatcaatcttggctgatgtttctcgctaataaagaattgccgaagaagatcagaaaacctgtgcctggagttttgaattatatgtgaattttgcttatttgtgcaataccatgaataaattgagcttcaagtttaattgcagtaccaacattctgatttccttaatatgcatgcctgtcttttactactcaatattattgaataggaagttataagtattgggcatgtgcttgtggggagctgggttttgctgtctccaggtgtaatttcagtgcttattatgagctaccagtcttggcagggaggttttggtggtctgtatttccagctcactatcccccacttccacccaaaagagtgccttttcaactttcttaataaatagcataattcattcatattctctctctttctctctctctcttcctccttctgagcccttaaaatacagcttcacctgaaatgcaaaacagagcaacactgtaacagaagcccctcttctgcaagaagaaccttgaaggttagatctaaattagtgtggcataagccattcaaagagtcgggcgatggagataggcagatctggtgtttgcaagaactgcactcacatgtggcaccattctgtacaaacgtgatcatcctctaggggcttctgaaacctctggtctctcactagccccgagcaatgcaattaattagctgtatttggtttttcattacagctatcccttagggtatccctgagttacaacgatacgcctggggatcatttggggggtatcagagaagaacttagtgggctgtttggtcgtggagctcatgcatattggcctttactgtgagcttccagaggccctgtaacagatgtgaggttgtagagcaatcggcaagtaacatcgggaggtgttttctatgtctatgatgggaaaagctgcttagtgctatcttggcaaagttaatttgcagattatcaatcaatggggttacaaaagctaagtttcttttaaacgtcaaatgattttatggtacatctttcttcttttttttctttttctttttccttttctacttagtgtcatctccctagctaccacggacaagggtttaaaatgcacaggtagaatcaggctgctcagcttgctgttggcctcaatggcctcaaaggcttccatctccaccaggacttaaatctagccttgtgtgtgttgagtataatgattcctgttgttctctggcacacagtgacaaatctcaagcagtatctctgaatatgtggatatgtgttatacacatgtacacaggtggcaaccagaggtagaactctggtcacttactggatgagacacggtcttttcttgagccagagcgtatgatttcggcaaagctgactgagcaacggctcacaggaatcagttctggggttgtagacattcagggccatcccagctttttcgagtgttttggagatttcaactgaggtttgggttgcagtaatggttcttaaacatagccagattctcagcatcaacaatatctcttaaaaacttgttgtaagaaaaatgtcaaactcgcagagcagaggctggtagtgcctttatctccgtagagccagtcctcagcctgaggagtgactaacttagttcagatgtatcccacacactgtcttcttccccaagcagtatcttaaagcaaacttcacacctcattgtgttccatctttaaatatcactgcgtgttttaaaagacaaaagaaaaacccacatcgtacatggaaatgcaaacatgcccttgatagcatcatgtgtttccttggcttgcagtggtcgacagttgtctggtacatgtgattcaagcattagcatatggtccatgtatgataattgcatggtgtagttccagtgtgtgtatttacagtgaagccatttccctacaccacttttcattgaagaaacccagccgcctgggtgttttaccatctagttagttttattaacttcacctcatgttatttcttccacgttggtttatatgcattgagaacgaatgcctagactcagatccaattagtatttattcctttgccaagagcatcatgtgatccttgtcaaggaagtactccttacagtttcctctttttacagtagaaacactaatggtaactgtctagagtcaagagcttattagggttacaaaacggtggtgttttatcttctgtttttatagagagaaagttggcctcatttggttaccaggacatagaagacagcaccgcctcttaccgactgggtccgatgcatcagtgccttggcatcctgtgcactgacttacatgtttatgacttctcgtatttacatgctgactaacagtcaagtgtgtctgtattttagtcattcaatttattttaaagcataacttatgctccgaatgtcttattttagcctctgggaacctcttcatgttgacttagcatgcttttgatgctcaggaaaggccatgcatagttttcctctttcctagtattgttgggtcttcagctctcatccacccatacctttctgcccatattccgacgttcgccaaagagccttgattctcttagctgctaaaagaacataaccatagcactatggcatccattattgcaagactgggtttttctttcttggcctttagagtgggcagagataaccaatatatgctgtgtgtcttgtctgtaaataagattatcatggtgttcaaatgcagtcttttcattctaacccaggcctaccagacttttattttaacatacatgtcttacagtatcttaccgtcttgtcttctgtctggcaggctgccatttaaaatccccatttcctctaccttataatacacggtaaccttcaagtaatggtgaatcagctatgtgatcattgccagcctgttaggggaactgtgcatggaagatgtttaaaggtcaggtatgggtgctaaatgcataaggctgcattcacttggtgtgtgctgggatgtgtttccccctcccccccaaattgcaatatttccctctcaagtaactaggggtgggtgttaccctgggcacacatagacacacacacacaatggactaggggtgggtgttaccctgggcacacatagacacacacacaatggactaggggcgggtgttatcctgggcacacacagacacacacacaatggactaggggtgggtgttaccctgggcacacatagacacacacacaatggacttgggaaccagacttccatttaaatccacttttgtttcagtctgtccactcttactgtcagaattcatcagcaatatcattttcatcttagatatgtttggtggagataaagctcaagacctttgacatgacaggtaaacactgtaccactgagacaacatccccaattcatcacattctcacggagagatcatgtcactgtcgattcatgggcctaaaatgttgatgtcactgttacttaagatttttttttatatagagatattattaggttcagtttcttgaaggaaaatacttcttagtttcttttcttcagtcatcaaagttctgtttgaaaaatacagccttgggctggtgagatggctcagtggatcaaccaaggtgtttacctccaattcaaagaccagagtttgatctctgggacccagtatgtggacggagagaactgattctcgacagctgttccctaacctccccacgctctctgtggtgcatgcgtgggtatgagctgccactgtcacttccccaccacaaatgaataaatgttagctaagtatattttcattttcccagaggcttcctctttcttgtgagactccttactgaggaaatgtgctgttgggtaagcattgctcaaaggcttgagtttcttggaacaatgctagactaacccttaagtatattgagagactttttcaaacctaagagaattaatttgttcttgtattatttactgcctaaaactccttggcttgtctgtcagtgtgcccctgtgggggagcctgagagccttgagtggactctcagttcttccgtatgaaggagccagctttctctagaatcctctgatcgttggacaatggccacttttatagttgttcttaccgaatccaattctggtaaacaagaattatgaattctgcagacctcccttgcctcccagaaacctttggagtaaaaggtttttatattcaaaacattccgaccaaaatgtctctttgcttcctttttgaatgattggtatgcatacataacagtagcatgctggcagccagcatttaccctaatacatcttaagatgaaatccccctggaggtgctcctgcgccgacggtggcacatggtgcctctctcccgaatgatgagagtatgcgcgtggcgtgcatagacacagggggaatattaagttctcagaaggccacaggcacaccacgagcactatgctctaacctctggcaggtgggcaattgcagcttgcttcccacttcagaaacatgtcggcagatgtaggcacattatttaattaactaataattgagaaagctatagtcactattaaaagagcaaagctaattctgggctgataaaggactcttagctgccctaaataggtcgtaattagctggcagcggtgtagctccaccttcagggatgggtgaaattaatgaaagctggcagtgaatgaaactgcatttcatgctcctgcctcaggtaaagagggtgaggagagagtgagtcgctttttagggccatttaggaagcagaggacatgacagccactgccaggaagtacagagagcatgggacattggtttgtatatatcaagttctctgctgcctttctgccagagaactccatcattggtactcagtctccaggagagagagataagccagagatgtgccagccctcattgacatccagtggtgacagtcccctttgtctagccagggtcttaaaggtagcatgagtctcactctttctactgggtcatttttgaaagtttcttctattcactctagggattaaattgactcacacctcttgggttttcaaactctaggttgaggtgtattacatctcctctgagtatccgaggtccctgtgagctccccctaccactgtaccaaggcaaacagcttcaaagaccacagtgtaggaagaagagtcaaaaacaagtcatacaagctaccttagttagccaaagccaaagaagtgttattgttgtatgctgactccagagacagagctgtctagctgatcctaactttcagtaaatagctcctaacctcagaaaaacctggaccaagagaaacacgaaaagtggagcaagccttggagggaacagacagtattaaaaacagtgtttcctctttttgttcttttgaagactgtcattgaaaatacaccgaagcaccttttcctctgtaagtggaattaatggcccttctccagctgatttatttggcaggaacacagagttcatacaacagttgtgggcagacctgttggactcccaagtcacaaaagtattataaggcacctaggactgtggctttgtgctaacaagcatccaggcacagggaacttccatcttcccattattaagtggccggtataggtacctctgtaacgtgcagatactggagattaaaaatcctaggagaaagccaggcatggtggtgcacgcactcgggaggcagaagcaggtggatttctgagttcgaggccagcctggtctgcaaagtgagttctaggacagccaggactacacagagaaaccctgtctcgaaaaaaaaaaaaaatcctagaagaagacagcatctcttagtaacagcaacatagaatgtactgacttctgtgaatttaaaactctcctctcctctctctctctctctctctctctcacacacacacacacacacacacttgtacacacacatgatgggagagaaggaggagagaaagagagagacagacagagttaagtagagagattatgctatgtagaaatttccagcagacagttgcactgaatatccctctccacatagcggcttctgagcactgcgcaggcgttgcctgtttgacaggacactgtgcaagccgcaggctgagtctagaactgggctttccaggccttctctaaggggtgcttgtttgttttaggttttgtctcacattcaactctctacttctgttatttggatttcttctggccatatatttatttacttacttagactgtctttctctcatcaagactaggtcaccactaagggagttaagatttgtgagccaaaaacagtctctttctctgtgttcttttaaaaatagacttgaggaccgaagagatggctcagtagttaggaccacgtgctgctcttgcagagacccaagttcagatcccagcactcatgtcagacagccctcaaccctataatgcctgtgtcatggggatctgatatctctggttgccacagtcacctgactcccatgcatgtggccccacacatgcacacataatttaaagtaaaataaatctttaaaaaatgaacaaaatatgtttcttttttgtttgtttgtttgtttgttttcacttaatcttgttaggttcatccgcacttctagagtttaactgcttaaaccatcacttcagagcgccctgcagaatgcacagagtgctggcgcctgcagattgcctctgtggggtgcttccttctggaaacatttcttcatagctatagaaaagactccattgaattagagttcttagtgtagctcttttccttaatacagagtagattgtctgaatccgcagagtccgctccagacttcggtgtacatctggttgattgctgattcgggcgatctggagccagggtgtagagtttgcattttcaatgagagcccaagccagcttaatgtcgctcatctgaggaggccaccttaaaatgtgctatcttgattgtcttgaaagaaggacagaaagtatctcattcaaagatcaagaatagctgtttctcaattaaccatggtaatctttagtcagatcccgattctgtggtcttaagccagggcacgtatgtgatgcactgtgtcctttgtccatctttgtgggacagtgtcgtgaagactggtacccatctcaatagtaaaagaaagtgtactgtttaccatacgccatccctttttcagataagggaccctcaggtgtcagggctccttgggttctcctcagtgatggcccacttcacctcctccattatttccactgctgtggctatagtgcagtattgcctgcatcccacacaggtcactattcacccatcccacctcccccacaggtgacgactcacctgcctcgcctttgtgcttgtgcagagacgcttcttatgtgactggccctttcatcacgagtcacatggacacaggccatgcttcatcaccaagtcaagtgccacttccttcatgaagccttttgcaacgtgcccagctagagcgtgtttgctctgaaagcccatagcattataagcttgaggttttttttatagaaaccatcactttttatcatgcaccattgctgcttaagtctaagcacatcagatgctccacaaacacctcaaaagggtacgagctcttatccatttgtttctccaagcaccatagactgcttgacttaatagtcatccagtaaatatttaatggatggatataaatgaatacaaatcctacccaatacgtttgtgagttcaaaaaccctttttgtgagctggagatacagcttagcggtagagagcttgcctggtgtgttccaggccccaggttcaatgcccattactgaaaaaaacaacctagaaatccctttgttgtttatgaaataccagtgaatttccgagcagttttatgtcatataggtggctcacagcaaagttgaatggataaattgtagggctgaattctgatagaaaagtctccacagttctattcagagagaccacctgtgctgtcttagccaaaggttggcaaatctgttaccttttctagggttttcatggctgggtgctgggtttgtaataagtcactgacagatccattcttcaaaggcagtcttctattttagtttctcaacagtggtaaagcaggttccaaaatctcactcaaaattctcttagctgccagttgcttcatgaacagacccacccagagaacctgaacccaccaacactcttgatcctcaggaggcaaatgtcacagttacccagagcagaaacaaaaacaaaagacccaagcacaggacgaaagcttctagcaaaagcatctgggtttcattcttcaggtatgcctcttgagttgtcctaaaacacacacacacacacacacacacacacacacacacacacacacagacacacacatatctgtacacactctctctcacacacactcacacgtacataacattttcttctttgataggaaatctataaattattacactgggaacactaaataatttcatgatgagcctagagaaaagaaaaaatggcagctatatcttctagtcctctgcataaatggttgatgggtttgtgtcctacacttgaagggaaattattgaaaacatttcttttatacaattcagctcatgcccctctttggtcaaactctgtgatagccctcttccatattttaaaaattgaattcatatcttcata

SEQ ID NO: 827 - DNA, 647 bp, Mus musculus
atgtctgagttgaggttttcaactgaacaggagcatgcaaagaggaagcccgtgcttgtggtgagcttcatagccctgtgcatcttgctgctagccatgcgccttgtcaatgatgcgactttccctttgctcctgaactgctttggacagcctaagaccaaatggatccctttgccctacacattcaggcagcctcttcgaactcactatggatacataaatgtgaggacccaagagcctttgcaactgaactgtaaccactgtgccatcgtgtcaaattcaggtcaaatggtcgggcagaaggtgggggaagagatagaccatgcatcctgcatctggagaatgaacaacgccccaaccaagggctttgaggaagatgtcggctacatgacaatggtccgagttgtgtcacataccagtgtccctctcttgctgaaaaatcctgactattttttcaaagaagcaagcaggaccatttatgttatctggggccctttccgcaacatgaggaaggatggtaatggcatcgtgtacaacatgttaaagaagacagttgatgcctatccagatgcgcagatctacgtgaccacagagcagcagatgactcactgcgatagagtgtttaaggatgagactggaaaggacag

SEQ ID NO: 828 - protein, 216 aa, Mus musculus
  VARIANT (1)...(216): Xaa = Any Amino Acid
MSELRFSTEQEHAKRKPVLVVSFIALCILLLAMRLVNDATFPLLLNCFGQPKTKWIPLPYTFRQPLRTHYGYINVRTQEPLQLNCNHCAIVSNSGQMVGQKVGEEIDHASCIWRMNNAPTKGFEEDVGYMTMVRVVSHTSVPLLLKNPDYFFKEASRTIYVIWGPFRNMRKDGNGIVYNMLKKTVDAYPDAQIYVTTEQQMTHCDRVFKDETGKDX

SEQ ID NO: 829 - DNA, 123331 bp, Homo sapiens
  misc_feature (1)...(123331): n = A,T,C or G
ggaatcagagaaaaagaaaattaagatgtctgaggtcattcagctattaagtagagctaagattttaattcttggggcttcaaagtaactttagtggcagcaactcagaggaacagtataggtaaggaagagtggatcagagaggcagagatcattagtttggatttggactattgaacttgagttgcttctgggacatccagattgggatggctaatactgttggaaatctggcacagagtgatctggtgatggtttaaaaaaaaaatcaaaggctctttgataacagaccttgtgcattttacatctaggttcctgcctaatagtggagatgtttctgcctttgctattctagcaggggaaactatacgtaataaatgcatatgctttatattgttttagtgattcaaatgactgtcaatgcaatattaaattcagaattgataggaaaactgtcctacttagaaattcaagagttcttggcacaatactatttattatcaccatgagacctgtgctgtagcaaaactctgcttgtgtttcggtgaaagactgtttaacatgcatgtttcactctaccgaggttcaactttgacctataagaggacagtgtatattccttagagagatgctaggaggtaccacaattgatatctatgtatgagaagtgggtgggatatgcctgcatgagcaacataatctaaaccaagttcaaaaaaagaagttttttttttttccacaggtgcaatcttgacaagaagaaaaaactcaaaaaggtattttgcattggtaaattctgatgtcttgggcagctccaggactgtttgtcatgctttccttatggacttctggttatgcctccttaaggatgtgggctgagggataatcatttaaaatagtccaggcaccatttctgattctttgttccctagaatgatgatggtggtggtggtggtgaccacaacggtgacaacaatgataccaccatatttcattgatttttaaaatgtttttccacattttcagctatctaagaatacttatactcagtacttccttgcagtcactgtcagcctgcaacaaagttaaatttgtccacagaggattggcattatttcacatggtcacctggggtcactaccaacctgagaccatttaaagttatttgctgaggtgttttgtttgtttgttttcgcactgtcagtatgaacttgtatcagaaacctgcatgagtatctgcttgtggttcaagttctcagggaagattatttttcctctttctcttcttgctgtgcctttctgaatggaagctttctttctggcatattctagtgctaagggaatagctgtttggtgtttcagctttttgcagaggtctcttattagactcccatcttacttttctttcttattctatttagagtaacagtgtgactaacaatcgatggtctcttatagctgatgaactactgtaacaataaaagctaacatttacttagcactttccttttaccaggcagtgctctaagggctttttatatgcgataactcatttaaaccttcaataattatattagatgggtactcttattttccccaattttaggtaagaaaacgtatgctgtgtgcccagggttgcacatattgactcacttagtgttaccagtggagggtgtccaggttctgggcgttttgaacaaagaattgcacaaaacacacaaacaaagcaaggaaagaatgaagcaacaaaagcagagacttattgaaaacgaaagtacactccacagggtgggagtggccagagcataaggggctcaagggcctggatgcagaatcttctcaggtccaaataccccctagaggtttcccattagcctgatgtaaatgaagtggtgttcacctcatgtaaatgaagtggtggtctgcaaccagtccgattggttgcagaaagcaaccaatcagaggctgagttacaaaggtcacagtcctatgcaagttttctgcaaccaatcagaggctaaagtgatgttacaaagttacatttctatgcaaacgaagacttggcccacaatcagtctgattggttgcagacagcagttaatcagaggctgaagtgaagtttcataggtcacactcccatgcaagcatctgattggttgcaaaaagcaaccaatcagagatactttccattttcaatctgccacctagaaaaagtggggttttgcaaagggagtggtctctggtccttttgttacctagccagtggaaagttagggtttttctttcaatttagtcctaggaagtcagcgtgaaacggccttaggttccctgcctccagaccctattctcttgcctcattagtgtaacttgaccacctgagtctaccggtacacccctggtgagaatccacttttagctttgtaaagtacttggcataatgcctgatacttgctgagtacatagtgagctgttgcaagtcccttccactaaaaaataagctattgtccttatcagaagaataggatactcttttgttatctatttctcattccatgatataggattctagctttaagtgttgtcaatctcagacaagagttgattatctaaaaaatatggattcttgtaagccttttcattatgtgccatataaaaaatgttgctccaagcaggtttactagtttatcaccattcagatttacaagttctatcaggaacttcaaagcaatttcctagtaaatttcctagtaaaaagtccagtttaacaaatgtttaaatttttctcacttctctttatattttaaatttttctcacttctctttatatttcacaccctaaccctctccctcactttcccattccccaccacattcacctcaaatctacacagaaatcttaaagtgagatgaattaagaaaaaaaaagaaaattgccttttttcttttatgaaaaaacatatttttataataatctgaatctgaaatttttgaaataatttaggacttatatttagaaaaaatcatttaatccctctgtccttccttctttctctccttcattctttcatttcttccacaaatatttactgaatattttctgttaaagacattgtgcttgatactgccttatgagatatatttctcagattttgttcatgtcctgaagaaattttcaaagacaaaattaagggggaatctttctctccttccctcccttcctttctccctccactctccctcttccctctttcctccatcttctttctccatccaccccatcccaccccacccttatccatgaactagaagccaaggaggaacaaatgctttatgggggaaacactctgagcaagttatattggaacttgcagagatgaggatggtagaatacagcaagggggccaggaggagcagcatgaacaaggtcacagtaactggatagcaaaggggctttagagaaggctgagaagtccagcttgaaacatggaggacaggaaagggagagatgggagaggagacttcccttctcacttcacttgttacagagagatgcatgtgaggtgtgaggataaatgccatttaatgtaaggtcatgtagattcacagaaaaataagagattccagctgatgtcattatcatcgtagtcattttcatcattgtcgggatgcctctggcaggacttcctccctaatgacaccaggaccaccagaatttacacttatgctctgcttctgtgtcctgaacaccttggaggtacgaatggattctaagagacaaactcatctcgtttagagtgaaaagatgacaagcagaggttcgcagaagccacatacaaccaatgaagcctataaggtagctgagaattaaacaaaagcacctgttccgattaccttcattgttcctggttagttagcacctccctttcctcaacagaatgcccggcgcacaggggtgggatctgagtgagggcaacaggtggattggagaacatttcttcccataagtagtaggatttgatggaaaaacaagtaacttcagggtaataaaatgatggaaagtcctgatgggtcaggtccatatctaatcttaagaagggcagccttaggcagcatagtgggtgctagaatcattggtaccatcaagaaaagagtagtaatgtgaatttcaaagaagatcactttgggataatgaacagcatgacagaatccgggagcctaatgaagaagatgtgatatagtaaaagaaatatactgagtgtaggctttgaatagggcagaaggagtggaactagagaggcaagaggagatgtgattacggaaggtcttgtatatcataccaagggtctgcacttacactgtagagtccagagggatctaaatgtaggatagacaggatcaggtttgattttggaaagctcagtctggaggtggtgtggccaatgtttgggaagtggtaaagactctttcgggaaagacaatatcaagagcaaacatggactacttcatcaggtatcaccagcagatattaaattatcagtacaaaacccagcaattattactttcagatcggccttttttctcttactaggagaatatagtccagatagagtgtacgtgcatgaataatcatcatagtcttaacagaggatgaagtttaatgagtgttatcagttagataattatttatataatctcagttttccagacaaagaaatagaggcatagtgagatgaagtgactgcccaaagtcatagatggagaaaatggtaaagatgacttgaactctgatattctgcctctagagcctgtgttctagtgtgtgaattaactaagttgttaattgttattcatactaatgggaacattctcatataactggttcagaaattttaaaaactggtaccagccttaggtagattttgtaatgcagtttgtcagtaaccaaaatacctaattcatatggaaaattaagaggctggtgtgaagcatgataattacatttactttgaaatcagcaatttgtggataaatttaattcattttgcccaactctggctttattcccggtattaaaaagacaactacagggtgcacttggttagcactcagggaaaataaagcaattatttttccacttctgctagagaacactaggtaccctttgtcagtcaattgtatagactcttattgtaggcagtttgtaggaaccaacctgatggaatgggtatgtcttcctctttcagctccacaatccaatgacccttttgttcaacaaagacacaactaaacaacaaaatgttggtagttaaaaaaaagtttaaaagtaataggacgccttcaacatggtaatctactttaagaatttagagcacatgtcagtatgtcaccttcagacatggttatagtccagtaagaattacaaatccaacaaacaaaaatcaaggcaatagagttttcatgggtaccactgtaataaattcttctgtgcaaaaagccagtcctagagaaaaattataggtagcaacatttcctgaggaacttttttcccaaaggagttttttttttggggggggggtgtgcagacattattgagaagttcaagttaacatgagcattatgactgtatcagatgacatgataagaggttacattgaactttctaacacctattcttaaattataataaaaaaactcattgagtttttaacatgcctgtacattttctcattttattcagggagtagatttaggtttttctggcctgactggatttttaaactgctacaagataacataaaaataatcatggctatattcactgagtttgtttcattttgtaaaattatgaaaaacaagtttatctcattcagtctctttagcatattgattcagtatatctccctttatagaaaagaaagaaagcaaggattttcacaagatagagctgaagactgatattgagtacatagaatgaagagcccagaaagcaacgtctctcagtgtggctggacagatagacacaaataaatttcatccaaagggttagttctgattatgagaacatgggagccttgggccttctttacttacccatacccctaacaaattagtggggtttttcctagagttcactatagtttaataagcgggatacacccagatttttgattcaacgatgaaataaaatgaatgaagcttttatttatatactctgtgctttgctacttcaactttgtgcaaatggaaagaagctttattgcattcagagagaattagatttggaacttggtcagtggcacaagatagaactataacatattgatgagacaactttttatgtgggaaaataattagcgtttgataaaatcacaaagaagcaatgggtagggactcatcaatgtgtgaagtgactgagcactgatacacataacacagttgacattgtctttaatatttattattgaataaatgacagcatgtgaacaaaagtgtatgcttttcacactagtgaatacttggtcattaaacaatagttaaataaaaaacacaactttataccattggttataatttaggaaaaagaaaacaaaaacatctgacaatagactggattaaaagttaaagattttattttgtggttaaagactacttctacagtagaaagaataaaaacatatacatattaatatagattgcaaatttgctaggtccggatctttgcacttgtgttctctcccaaaataatggattttctgtggattttattttggaataggtatttctcctatgaagtctgataaatgatattcccactctaaagagcaagcagctagaatgccatgtttttgatgcatatttttgcagcacagaggggattaaattctaaatgtctcagctgttaaaggccccttcagacttgcccaaaatgaagaacaaagaaggagaaagctttccctaaagcaattcatcagatctatttgggcacagtgacattttctcagaacttatatggataagttacactgaacagttcaagggtttgcagctgcttggaatatttaagaaaaaaatatctctagttcttatgcatttcatatggtctgaccagtgctcaacactagctaatgttcactgaggctgtaaccatcagtagttatgtcgtaatagcttttgtttctcgagagctcattatgtgcctggtactgtgttctgcattttccactcattgtatcacttaatatttatgcttctgatcttaggggaatgactgtttatattgcatatatgccatttttttgcagtatgaaaaatttgttgagccgagtgtcatacattataaactgacatgtacttactgttgtttaatctaattggtggttgttaaatctaaaggatgttctaactacttcaataaaggcagcagcaatcacttccataaataaatcattagacgtagaacacatgtgtaaacaggtagagtcttctaatttgctaagtgttgatggactcaaaacagttactagaacaagccatagatggaatacatttattgatggaataagtcaaacaacttgaaacaaggcattgtggtgtcttaaatggtaattcaaataaaatgaagtgattgatacatttttacttgtttggaaagtggagaatatttcggaattgcaaaacattgcacttttatatacatttatcctttcattatcctaatgtagggtagataggacagttgattgcatccaacttcatttatttggcttattatcttttgttttatgattttaactctgtctagaatcatctcctaccacttagagtctatgtattcttctgaccaaatgacttcaagttttctgaccaaattaatggcctttcaaactgttaatccctctgcctggaatgcccttcacatcttctcttggcgaggccgccgcggtcctcaggactctgttggaatatcaccaccccagacaaacattccctgaactgttcctcctatacttacccttcctctggcctcccacagcaccctgtgtatacccacattagcatcatttgacacctggtattatagtgttctatttactggccagctgcaccaagttgtgactctttggaagcatggtgtgtcttttatggttttatttcggttttttcagcacctagccaagtctacacagagtatggactcaatgagcgattgtggcttgaagatgtaaattctttagtatgtattgcatgatatacatgtgagacatgcatgtatatcatgcatattagtactttgttcacttccccacctcccacatccctatgacacacacacattctcattgcattcagcgatgtgtagccttctgtctcatccatggttttcattgtagttgctgaagcttgaggtcacgatctggtggaagtgactactagaagaaggcacatgtgcattgtattctgttgtacttgtcatctggagcacacagtgtacttgaaggtatgccttttctagtggaatttcagagtggtttcatactagcagtatgagaacactttcatgctaaacaagaagggcaaagaatcaaacccgggcaatgtaacagaaactgagctgggggcctgagctgcagaaggaacctctgtccactgcagaataccactcccagtggcacacagaggagagggtgtctggcttctgctctctggttgctcccttcaccctctctgtgctcattacttggttccctttgatagaacatgagaggcagacatgggttgccagggagcaggcttttacaactgctatttcatcctgttttgaaatttctctcaaaatggttgacttatttttctctcacgtatgcatacgtatgtgttgctgcacacaacagtggattcagaaaggctatccacatctttgtccccaaacccccagccatgcaatgcaatatagcaaccaagagaaccagagagccgtgctgagctctgaataaacaaaagcacaaatcccatctgggtctccttcaaagcaagctgctattttgcaacaagctaccaaatgacgattaagaaaaaggttcttacctgtttacttaatgggtgactggcctctttgcttttatttagccatctgttctggtctatgtccctttaaacttgtaagatccatcacttcattaaactgttaccttgacacattgcnnnnnnnnnnnnnnnnnnnnattaaaacagtttttcatgattagaagcttaaatgaggtaaggctgtggtagttagtggtgagataaggggtgttgaggaggcagagctcaaggggctttcaggcgattggaagattaggctggcgagatggagggctggggcttttccaaattatgggaggtgagcaagaagcaagactgcctttgggtatcgctgactcctgggggctggttccattgcccatacagaggctgtgaccctggccctgggaggatacaggaactgccttcaggtttcttgacttccctaggagagtctgcgaagagcaaaaagaactaattccaccgggtagtggtaagctgaaaatgcaacaacaataaacattttggtctttcacagaaagttatgtggctttccttaagttcgaagaagaatcagggggcccagcccaactatatgaaagaatattttattgtgtctttaccctgcacttcatggcttcagcagtcctccttcttgctctagacttaccttccacctgactccttgacagttgctgaaaactagaaagtcaagggctttatctttttactatcttatgtcagttcctgctctgacaactctggtttcttctgatatgacccataatattgccgtcacatggaccccaaatctgaggaatctctgaattttccgtcagccgcttctgtcctgtcagtagcccaagttctatttctcccacctaaatcaagtttctcacatctttttccaccttgttatttcttcttcttctgccctagttttcatccctcattacctctgtcctaggcaattgggatagcctcctaactagtcactgcctacctatactctctccctgctccaaagcatcttaaacactgatgtttgattataactcataacttccccccaccccgccttttttttcttttttaaaaaattatactttaagttctgggatacatgtgtagaatgtacaggtttgttacataggtatacatgtgccatggtggtttgctacacccgtcaactagtcacctacataaggtatttgtcctaatgctctccctctcctagccccccattccctgacaggacccggtgtgtgatgttcccctccctgtgtccatgtgttctcattgttcaactcccacttatgagtgagaacatgtggggtttggttttccgttcccatgttagtttgctgagagtgatggtttccagcttcatccatgtccctgcaaaggacatgaactcatccttttttatggctgtgtagtattccataatgtgtatgtgccacattttctttatccagtctgtcattgatgggcatttgggttggttccaagtctttgctattgtgaatggtgctgcaataaacatatgtgtgcatgtgtgtttatggcagaatgatttataatcctttggttatatacccagtaacgggattgctaggtcaaatggtatttctggttctagattcctgaggaatcaccacactgtcttccacaatggttgaactaatttacactcccaccaacagcgtaaaagcgttcctatttctgcatgtcctctccagcatctgttgtttcctgactttttaatgattaccattctaactggtgtgagatggtatctcactgtggttttgatttgcacttctctaatgaatagtgatgatgacctttttttcatatgtttgttggcttcagccaaaacagataaatagacaaatggaacagaacagaggcctcagaaataatgccacacatctacaaccatctgacctttgacaaacctgacaaaaacaaacaatggggaaaggattccctaattaacaaatggtgttgggaaaattggctacccatatgcagaaaactgaaactggaccccttccttataccttatacaaaaattaagatggattaaagacttaaacataagacctaaaaccataaaaaccctagaagaaaacctaggcagtatcattcaggacataggcatgggcaaagacttaatgactaaaacaccaaaagcaatggcaacaaaagccaaaatagacaaatgggatataattaaactaaagagcttctgcacagcaaaagaaactaccatcagagtgaataggcaacctacagaatggtagaaaatttttgcaatctatccgtttgacaaagggctaatatccagaatctatgaagaacttaaacaaatttacaaaaaaaaaataaaaataaaaaaataaacagccccatcaaaaagtaggcaaaggatatgaacagacatttctcagaagaagacatttatgtggccaactgtcccctttaacaaaacaaaatttcttttggctttccatcacctagcaaacttagtatagatgtattagcttgatatctgaggcaattcagaataaagttatcatttgtgtttctagctttttctccttcttcgtgctccagtaagacaaactactgtacgcctatgagtaactgtatgtattcttgtctgcgtgctgtttcctctctctggaaagctctgttcacacatatctgtcaattaaaacacatgcattttatcaagctcaatttcaaagacatctttgctttctctcttctcaatcggatgcagttgttcctgtttttcttccatggcagtatgtttagaggaatgttctgctgcttggcataatttttttttcctcttgttacttttttgaatcttacttttgcaaatcctatagcacaggcagagtttcctactcatacagggtgctagatacagaaacagaagaatgagtgataatgatactgtgtctacaagaatgtgaacatccattcattcatttatttattcattcatttgtttcactcaaatgttctttgaatgcctgtagtatgtaaggtaccatgttaagagcctgggatacagagatcaagatgacacagtacattccagttctctaagaactcacaaatccatgtaggaaaatcacataaataattacacagtgaaaaagtacaacaatagaagtgtctttaaattatgggaatgatgggactttacctctgttagagtggataggttgggggtcaaagcatggtggtgaggaggggattgagcaattagaaaaggtttcctgtcattggaaatgtctgattggggttttgcaaactgaataggagtgtacaaggaatatagtgagataaggaagggtggagatgcaatggaagagttcaagaaagcagctctgcttgctctcagcagcccagcacactaggacaatttggtcaccaaataattattttccatttccaggtaaaatatgctgaatgacagaatccttcgacccctatgaaagaaaaagagaagaataaaggaacctccttctgtgactgcctttggttgaaagtcattcgttcttctttttgtttttttaatgttttgtagagaaagtctgtgattgctgtgagcttcatagcagcgttccttttcctgctggttgtgcgtcttgtaaatgaagtgaatttcccattgctactaaactgctttggacaacctggtacaaagtggataccattctcctacacatacaggcggccccttcgaactcactatggatacataaatgtgaagacacaagaggtaagatcccagagggttacctagcagttggagagtatccatggtaacagcttttctttaggagccagagggcttccaactcactgaacttactctgtctgccccggagagcttgcttgggtccctgacaacatcttctgtcttattattcttagacatttactgacaaatgtctaaatctgccacccctcctacattaaatcttctgattcactggcttcatatggagtcaaggaagcaattacttgttttcctggtggtttgtggcacaacgtacatatctctccatttagaagctctgatcagcagttaccagctggagaactagctggcttgatttcctgtaggtcaactggttggggagagctctttatagaacttcaaaaatgcatttatactccttaaaactctgtaatccttagacctggagctagaaaaggccaagctgattttaaaatttgcagtggctgcagagataatgggatttaaagagttttcaaatttaaaggggttaaaatcgtgtaaatcctataatcacagaagctttaaatctttgtagccaattggtagtacaggagaggatggaggtatattgacaactagaaagtgcacactatgctagcgcttttgcaagcaagcatttgtctcataaagtaaaataaaaataatgaacctcacaaaatatgtgatgtatatagaagtgcttaataaaattgttttcactattcatttctatggagttggatgaatgtgagtttaatattcagagacacaaagtccaagcctgtttgaaattgttggtaacaaaggtacaagctaccagtgtgtctacattactagggagagtcttggatcagctcccatcgaaaggtcattttgtaaagatactagagggtagagtcatgcatggaatgctactcctgtcctgagagttattcttagcattctgggaggatgctaagcttggtctacccccttttgtagtcaatctcatatctgagtcattgcttctggttaatttgattcttcgaaaattgtttctgtatctgcaggatttacaggcctttattagaattttatagttgaaaaaaagcaccattaataacacataaattcttagaatctttgatgtttatcctctaattggttttaaattaatttttttacagtgtctattgcttgaatttgttgagtgtcctaataaattgattacctatataaaaatgtatctctttgaggagagtttgtctcaccctcatcttttgttacttttatttctggctatcatttaatattctataactctactgtatggtgttaatcaattcacaagtgcctgtcacaggctgaaaatgaaacatgtgactaaaatgtctcacgaagtattctcatatgggaaatcccgtcaaatatcaaagaccctttcatttctttaaatattaatgaatttgatttcggagtgtgaaaggaaaaactgacctatggatgcagttatttaattagttctattaactgggctatctttgaaattattttgatgtagtttttaatacaatgattttacaaaagaatattgaatattattttgctcctgcaaaggttatttcttaggagaaaacatagttactggaaagaatctgggctttggaagcacacaggcatggtttgagagtcagttctaacatttaatgaacttaagcagtatatttgcttttgggtaacttccttaacctcagagccccaatttccttatttgcaaaataaggataacaacatcagcctagcaaaattattttgaggataaaataagtcgaagtatatgaggttcccagctccaaattgctattcaatgaatgaattgcttttgctttctctgtactttccagtatggcataaagtgttcagtatgaataacatcaaattatcacagtccagagtaccagaatttatatgtacattttaaagatcctggacttgggggaataaacacatgtaggggttctcaatctcattagtaatcatggttttacaaattaaaaccacaatgagaaaaatatttaaaaatcacaaagagatactaatatacatgaaacgccagattggcaaaaaattaagaagtctgacaataccaagtgttgacgaggatgtggaacaacagatactattgtatacttgtagtgggagtaaaaattgtaatacccactttggaaaaaacagctccactgttgtattgagcaaagttgaagatttacatgctgtatgcccaaccatttctagtcatggatatctacactagaggtgctcatgaacccgtgcactggaaggcatggacagaacatgtagcagcatttttcctagtagccggaacctagaatatacctaaatattgatgagtaggagaatgaattagagtcgtgccacatacatttggaataccatacagcaatggcgatgaagaaactgcaagtatatgtgaccacatggaagataaagcaaagtacacaatgtgattccgtttatgggtcacaagaagagactaaactaaataatgttgcttagggacatatacaacggtaaactaaaaaaggaaaaaaaaagcaaggaaattattattatgaaagggggtctagcggttacctctgagaggagtgggcagcttgtgatcagaatgggtttctggggatttagcaatatactatctgttgatcctgttggaggttacacagatgttcacagtccatttattaagtataaatttatggtttttggacttgtatgtctattttattaaaaaattcaaaatatattctgatcccaggaaggatgtttatttaccatttaccatggggaaggaatcatacaaaacaattcacctaattcagcagcaggaaataactaaaaagaagcaatgggatattaagctatctaaagcaaactaggaatatttgaaataggcaatttgattttctataaagactaacagacacataagcaacttatttctctagttctggtctatgcatgatagaccccatattgcatcatgaatgcaggtgatagagcagaaaattttgcatgaaagttgaaaacattagaacactcaaagggaatgacagattttctcctaaattcaagtagttctaggctaactcgggagaaaataaaaactttgtgactttttaccacccttctcaatgatttcatcctttgttctgacagtcccacccctaccaccatgtctgtgccatgctcttactcccaaatgattgtgcatttgttctcactgtaatgtcctcaggcgcaatccgttgcagaaatggttacattaaataagagacacagtatgataaagctttcaagagccaaagtaatatagctgaaatgataggtggtgagttcagtgttctaggacaaatagcttaaatagtgaccacaaaaccatgcttcagagattatcacacactaagtccctattcattctattctaattctgagaaggtcaataggcttagctgaactgagtcaggtgatcaccaagctgatctacttatttcaagatcttggcccttaaagttttctcagaagactttccccttaaatgcatatggtttctggaaattactaaacttcttagtatttttttaaatatgcaggcatgccagcagtgatttccagacctagagcatctgcaaacaccatggctgttgatgatgggtttactgcctgatgcttcagcttggccagaagttgctgtaactagtcatagattttatgagctgaaatgattacaagaaagaatgtctctttactactgtctaaagaaaagtggaatgggaggcagcagaattaggtcaaacatctagtggacactgtggagtgtagggttgcttaggagcaaaatctgattctttagttatcttttaaaaatagatgactctggtccctttggattggcacaagtgaaaatatagctggtttgtgaatctatgacagcctgccctgaaggccccacatatagtaaattatacccagtttaagctctgcttcattttatcaattaatctgtttttttttaaaaaaataatctgttcccaggggaaatacaaaaattaaaataaaaggaacacaggagagatgtggttttgcttatatttcaagctgtttatttttttccctgatgtagatccataaaaaagagcatgtgaaaactgtgatgactattataaaggggttaaatagaaagatcaaaatattcctcccactgtaataatgatgatctaaatataacagagttggtgattggctttaactctttacctttacccagtctccccttcactttctcaatgagtgtaagctaaggttcttttctatgggggaggggaagtcttgagaagcagggaagaaaaatgagtgccaactaactgggtgagtgctgaaattctgaaagtcttcgctggccacggagccccaaatttctcatcaacacgtgtttaagctgatagcaaccatgatttcaaaccaaagcttggatcaggagtgatttagattttgcaacagaccctgccctcgcctccctgctgtgtcattaccgtgtctataatgcaatcccccattttaaaaatgacaatgtggagattccacctatagcattatggcagaattactgtattatcaactggctttggatatggtaaaaagtatatgtcacccatgtatttttccagaaaaaaattaaaaacagaaacgtgcttcacaatatcctaaaaccctattttccccttgaaacaaatgctatttattttaaattattaattatagcagacagaggaggtataaaggactaaggtagtccagggcttggttcaaggtaatcttgctttctcctgttgagatcatggcagatttttgggaaaaaggagaaaacgaacttcaagctaggttctatttgtagttgcctatgagggactcagtcattgtgttgtcttttttgttgtgtgacctggtgtgaagacattgctcagagcaagcagcctgcagtttatttgcatttactgctagatgaaaggatccagcttgggtgatcaataggatgccaaggccagatcttattggtaatcagtgagggtgacagatgtcttccttagacctgataggatcttccccttaagatgctggggctacagaggatttctggtatttggggaagagtgccctttccctgggtgcctgaaatgtgccaagtggagaggtgcaagattgccagaacacaggaagcaagtgcagggctgcatactgacttactcgacaatttaatgaggctgaagtatgcctctttaaaaaatgagaacgttttaaaacctcaagtagactaaataggaatatttaggatcagttgctgtgacagacaggccacactagcctaattaaagatgtgcataacatattgatgttgcaatagaatttcccaaattatggttatagtaacaattaaggaagagagctgactttcttggtgataaaagcacacactccacacatttaaataaatgtacacatgtaactaaagctgacatgaataggttttctatatttggtaatagaggctttgggttttacgtaagtatattgagagcaattatgtgcaaatgtatgtcccaaaagtttaaaactgatccatttaattgttaattaaaatccgaacattctcatttatgtaatcataaagcaaaatgaaatttgagtattaaatgttatagaaaaggaaacagctaaattaacatataataaatcaaaactttgtgactttttaccaccctcctcattgatttcatcctttgttctgacagccccacccctaccagcatgtctgtaccatgctcttactcccaaatgaatttgacatgtgtgtattggatttgtcattttaaggataatttatcatttttctcaagtatgaaaggatatattttttgagtggagaagagatgactatgtttctcagtctggttgtgaaatagcaactttcaatcaatgaccatatctccagacaatctatgagtgccagatgagaaggacagatgccactgtgggttagaatatttccaggaagcttttgtgggagaggtgagacatgtgctttggagaaagatttggatgggacagaggaagaagacaaagcagagttgggtaaaaaagcaaaggttcagaatatgtattgtgcattttccttcagcccctatgactcccagtaggccaaggacactatatggaaagctacagtaaagccctaatgtctgtgctggtaatcgtcattgcctcacacttggtggatccatttcatacctttctctggattcaatacctttagtcctaatcgtgtggctcttctttttgtttagctggttatctagtcttgtagtgctcttaccttggccctactgccctgcatactatgtagggggtcacttctaataatgcttctctctgtgtacccctgacatggacacaactccccatttccaaggggcccctgaagtactgcccaggcctctgcaatcctctgacttccagagaaggaagtcaggcacatgtacaggtaatacataggtcaacctggctggaacttactctggaatatagaagaagatagaaaatgcattcattgggtaattatgatctgggaatgtgagtgggattatggaaagaccacactcctatttagacataggagtaatacatacatgtaatatatatatacattcatagttatgaatcagtatatacaagtatatggaaaatacatacatgtatgcatgcatgcagcatatacatgcatacatgttcacagatcaagttctagccacttaaatacaaacatacatagaatatatacaacatactatgttatacattaaaatggtatgtaaaatggtgtgtaaatggtgtaaaatggtatatatacacacacacacacacacacacattatatatatatatatatagtcaggtaggtgtatagtgtgccttttgcggttgtctactctccaccttccctttattagagaaggtggcccttccttttgaccacaagggtgagcagaaaagtcaggctagtgattggtcaatcaagtgattggttgaggggtgggctcatggcccaagatgagccattctgaagccttctcaaattttattatgtttttctgggacacactggcaggaaaggcccccttttctctggtggtaaagctgttgggatgtgattctctggatgtcagtagctgtgttcccaagacagaatgagacaaagacactgagagaagcagaaacaagttgcaaggctaatgtgaagacccagacaacacttcaggtcctgagctcaattcttgaaggcagcctcccctcccatcccccatggtttgggtgtataagccaatatatttgtcttctttttacttttgctggtttgaactgtttttgtcccttgcaaccaaaaaagtcctagctgatatattgtagttattttacagccaccaccaccaaatgttcagtaactcatctttaaacaaggtgccatctgaaggaggagaggagtagtctttccaaatctgcactctcaaacctgctggggggccaaacacaagtcacatccatcagtcagtgcaggtgtctgcaaggggtgaacgctgtctatctttctgcttaggtgcatattgcttagtaaactagcttatccttttgtggtagaaaaatgaaggtcaatttcccaaggttataatgccagaaaatggctggacaagactgactactacctgaattgctagtcgtactcaactgataaatcatatagtttcattataattgttagatgaaaatttctctattgctgtgaggcatcagcagtcaaactagattgattttcactttacaaatcacattttttattgatgaaaaatccattattatcataggttttaatgtagtgatcggttcctcaggaagatataccgcagttttatttattacagagccttaggtagaaaagtccccatttgccaactatcttgttaacgcacttgaaaggggcctattagaaattcaactatcaaattacctcatttgtgacaagcaaaggaaaacaaaacagtgtatctatcacaaataccttgatttgagggttgaaaaagatgatagaactcatgtcctgatgtagagagtttttctatagctcttctcaagctgatggcctggcagagtgactagtgcgaaaagctttcatcaaatggcaattggtattaaccaaataccaaatattttgaaaagtgcttattctgttccagacattgtgctaaggatcagcaatgaactgtaatttaaagaagtgttaaaattggggttcaccaaagaagagaacaacatggacccaagttaggagtatcctggaacaataccacctagaaggtgtttgcattgcagcctgtaatgatgatggctgagtaaccatcttacacaagaaattcatttcactgttctcaagaatagtgaacattcaagtaatttcaattaaacacttatatttaatgtctaaaaggtaatttgtcactaagtagatggcatcaaattgtgagttcttatttttcagagtagccttacaaaggcttattcacaaaagaaagatagccattacagaatatttcatttcaaaaataactatatgcttttatatcaaatgttatccaccaccgccccccacccccccacaagtttgggaaatagtatgtctggttaaccgagtcatctgactaataggcatttgccaagtatttaataaatggattctttatttattcatttattgacatggagtctcgctctgtcacttaggctggagttcagtggcacgatctcggctcactgcaacctccacctcctcggctcaagcgattctcctgcctcagcctcccgagtagctgggattacaggcacctgccaccatgcccaaaaattttgtattttgtaaaaatacaaaaattacctctagaaataccctgctgtggtgtttcataatatgtgtatttgagtatttgctctgttgtcttcttcaaatatgaacatttacgaatcccaaagtatacctggttcaaatgattttagataagggattgcaggcctgtgtcaaacacagactataaaaatgattaagaatgaataaaatacatgggaagcaaagttctagcaaaaataaaatatctctgaaaaataattgaatataatgactagaaataaataaataaaattgtaatacctcagtggttaggttaaatgacagtcactgtgttaagtattttatgtgccattttcttttagctcttacggagtacatactattttactgatttaactaatttttcaaggcccccaaagtattgattctatgctagtgtctttcattgtcctgtgtggcaaaacaagaacctaagactatcctagtcaacaaattcctttaaatggtttcacagagtgtctgccaattcatgaagtcagtaagttcatggaatcccatttgttgaatttactacatgcaacgcactgtgctaggctctgaaattgtaaaaaagaaaacactttttgcctagggataaataaaattttttcataatgttaaaggctaataaagaaggtagaataacatgtgaaagattattttaactctttaaatgtagtcatagaaagaaagtttggagataatacttcaaaatattaactgtgatggtctatatctgggttgtaaattttagaatttttttaaaaaacatgttttccaaattttctacaatgagcacatattgtatttattactagaattttttttttttgagatggagtctcattctatagcccaagctggagtgcagtggtgtgaccttggctgactacgacctctacctcccaggctcaagtgattctcgtgcctcagcctcccaagtagttgggacaacaggtgtgcaccaccatgcccggcttaatttttgtgttttagtaaagacatggtttcaccatgttgcccaaggtggtctcgaactcctgagcctgatccgcccgccttggcctcccagagtgctgggattacaggtgtgagccaccatgcccggttgaagaagtattttttaagcaatgtatatctgtgaaacactctagaactttcactatcatttaaagaataggatttaaaatgtctagataaatatattgtttggaatactttaaaaagtgaatattctcccattccttaaatgtgggtttctcctagtgactcccttaataggactacaatatggaaaggagaataaatagtaactgtggtggaaaggctgacaaacactatctcagctaagtgatcaaggttaacatcaatagtgacaaatggtgttggtagtatatacccttggtatgatgtgatgaaaccgacactttaccactgaggccatcttccccaaatcccataagcctgtttaatcatgagataaatatcagacaaataaatattgggggccgttctacagaacacgtgatgacaactcctctaaactgttcaggttatcaaaaacgaggaaagtctgagaaacccccacagccaagagtgtcctaaggaaacatgacaactaaatgcaatgtggtatcctggatgggctcctgaacagaaaaaaagacattagatcaaaactaagtatgagtaaagtatggacttgagttaataataattaattgtaacaaatgtattatactatacgagatgttgataatggagaaactgagtgtgggctatatggtaactatcttctcaatttttaaataaatctgaaactattccaaaatataaggtttgctttttttattaattattgcactttcatttttttaatttttcacatatatatatttttattatactttaagttctagggtacatgtgcacaacgtgcaggtttgttacatatgtatacatgtgccaaacactgcatgttctcactcataggtgggaattgaacaatgagaacacttggatacaggaaggtttgcttttaaaaaaggtatttaggtttttgacctgtgcatctggaaggttggaattgtcattgactgagatggagaagaccataggagaaggtgaattgaaaaaatttgaaatatactagtctagccccatagggcagggatgtataagatacatgcattgtgaatacatcactgttttaatattctgtatttaatacaataaatattttggcagagaaatagtgagtattctagaaataattcctgtcctctttaagaagtacaagttcttcaaagattccccaggaacagctgtgcaagtcagtgtggctttctaatctctttcatctatacttacacactataacagttttttctattgcaatgcagcccaagttttttgcaaggtaaattatttgtaatattcttaggaagaaaaggtagaaagtaaataactttttggtggcttggtatggtgttgtattttgccaataactatttatttccaatagtgtttaatgatatttattggattgaagaaagttagctatctttcaggtatctttcccagagctcacaggacaatatttccagcatgcccccggaatggtagacatgctgaaaatattgtcctgtgagctctgacaatctagtacttgtcacaaataattatttttacaattattattactattattattatattattgctaccattggtatacatacacacaaatatatatatatatatttggtctttttgtgctctttattttgtttcattgatcaacatttttttggtaaatgctatttttatataattgttgcttgtagtattagacctacttctttttgctcatcttttttcagaaatctttaataaattcacctctgtatgaatttcagcatcattttattaagtagatgggaaatcttgggtgtgtcagaaaactatttgcataataatgctgtgtaagaaatcacccaaactcagtggcttaaacaattgtttattcttgctcatgtttttgtggaccagttgccatccaggctgagatcggctgtgcttagttccaaagctgcaagttgggtcctggtctgtttcatgtgtctctcttcaccaatgaccattgagccacctggggcatattcttctcatggtggaaaaagcacaaaagactaagttcaatcttgaaagcacattgcaagcttctggtggcctcacatctgttaacatcccattgatcaaagggaggcccaaaatgaaggggggagtaaagtgcacttcacccaccatgaggtcaagtcaagttacatgggcaagtccaacatcaatggagtgggaagtatactcctcctatgaaggtgagagtagagagagtgactatttgccaaaaataatttcattcaccattctggtggaatatttatgggaattgcattaaatgttaacttgaaaacagacactattagaacaattgccttttctactaatatcttatctacacaagtaattgttaagtaatttgctaaaaaagactatgaatgtacatttcaagtagacttcctgtggtatctagtaggagcttaaaaaatgtttgctaatctgttattcatggatattttgtatttttcttatcttgagtgccagctcttaaaatgatatgtgtaactattttagcatgcaaaaatactattaattttatatatgttttcctgcatttggttgctatactgaactcttctaattaagttctggaagttttgggttttttttttttttttttgcattgtttaggtatgcaatctcaatgtttttaaataatctttttctcatttcttttcaatattgattgcattgactagagcttatcaaacaatagtaaacaatactgtaagatttttaaagacagtacttctaatgtttactcacttagtgtaaagctgacctgacctagttttctttaccatattaaggaagaattcaaatgtttttaaaattatttttctaaaataatgcctatgtgtgttgagtttttatcagatgacttcctggcatctattgaaatgactggatgatttttctcttggaacttctcaaggttgtattttcttattttgaaccaccactgccaattaatttcttttttttcatagtgtgtatattagtcattgttctctagagaaaaaggaccaacaggatgtgtatgtatatatgcgtgtgtgtgtgtgtgtgtgtgtgtgtgtgtgtgtgtgtgtatgtgtgtatagagagagatattgagaaggagatattttaaagaattgcctcatgagattgtgggagtaagccagtaggctggagactcagaaagatttgcagtttgactccaaaggcgatctgctggcagaattcctctttgctcagggacaccagtctttgttctattaaagctttcaactgattggataaggcctatccagtttatgaaggataatctgatttactcagagtctactgacataaatgttaatctcatctacaaaatatcttcacagagcatcccattttgagaagcagcctcactgtgtcgcccgggcgggagggcagtggtgcaatctcggctcactgcaacctccacctcctgggttgaagcaattctcctgcctcagcttcctaagtagctgggattacaggcacctaccaccatgcctggctaatttttgtatttttagtagaaacagggtttcaccatgttggccaagctggtctcaaactcctgacctcaagtgatctgcactcttcagcctctcaaagtgttgggattacaggcgtgaacccccatgcctggcccagaataatgtttaaccaaatatttgggtactatgatgcagtcaagttgacacataaaataaaccatcacaatgtataattcttttaatgaattgttgaatttgaatatttctcagaaatattctttgggttatacaaaattattatcccatataaaagaagaggcagttgaggctaggataggtaatacaactcacccaaagtcacacatgctcaaattggcaggactgatatttgtccctggctccaaagccccaggttttagtcatataatcaattacacagaaaggacatccaatatgctgatacattattcttcagactggccttacttcctttgctcgggagtcacctgcctataactctcatatgtgatttaatcttgattgtttttgttgaattggggaacttcacgaatgagaagtagaggagttgagatttttactttctggcatgagctaccgttaaactgattatctcgctgcagtccacatctggaccaagtacaaaagtgaagcctgacttcttactctgtggtgctgataggaataacagccacaacaccaccatttttgccatcttgctgatgaattgacctcatatttctctacctacatttttcaaaatagtgctcttttatgagttactcaagccccattttaaaagcagtgtggttgataagtatgtttcatacctgcttgtactgagcttttttaaccttgtgctcttgaaataatatgagcttttggacactatgtattcagtacagactttcagagtgaaaatgttgattttcccaaattaaagaactaggggatatggtaatatatgctctcaattttgaattaggtggaaattgacatcgtttgtcagaaatatactgaggataaaaatgaggtaaagttttaggtgctgagctgtgtgccaaatagcccttgtgtttctttcttgaacatctacttcaaagaagcagatttgcctttgatatccctgggagccacatgaatatgaactgactccaattgccctcatcatctccagaatttattttttatttttttagggcatgagtctgtggtcaatttgcttatttgcttctccaaaccagcatgatcattataattctccttttcatgaaataacccactctcagcctgttgttaatcctacctagaggttgggagtggagtcacctaacatgagggcattcatctcttcagtaagtggtgtgcttgtgtcagaaatttttatgcagacaaaaacacaggaatcatcatggcaacagaataatattcaccacctgagccaccttgacatttctcagctagtaggaagctttcttttttcttttgtgcttttaacatagaagaatgcctcctaagttttgcaggctacatagtcatgcccatgagcctcctcttttcaatgcatcctgcccccataaccatttttctctgtaagtgatgttaactatgcagaaagccaattaggagattctacttagaattccttctcttaactgtttctcaaagcttatgtggtataactgctagaaaaagatgtttgaaaaataataatatattctatattggccattcaatgtctcaccttcatgccttagctcaaactggcaagcttctttatgccatctctacatgtagaaaaagtctaccgattccttaaaatcccatccaaaggccatttcctctgtggtggtttgcctgtctcacctccttagcagtcacggctctctctcatgagtccttttaacactttaataataactaataattataaacacatggatcattctttaggttttacaaagtttgttgacacatcatttcatgtaacaaataatcttgtggctttgattatattctccatttttattctctttctctctctttatttatttatttatttatttattttttgagatggagtcttgctctgtcacccaggctggagtacagtggtgcaatctctgctcactgcaacctccatctcccaggttcaggtgattctcctgcctcagcctcccaagtagctgggattacaggcatgcaccaccatgcccagctaatttttgtattttcattagagacgtgatttcaccatgttggtcaggctggtctcaaactcctgacctcagttgattcacctgcctcccaaagtgttgggattacaagcgtaagccaccatgcccagcctatattccccaacaatggagaatattaaacaaataaacacaggagggttaagtaattttttttttcttgagacagagcctcactctgtcgcccaggctggagtgcagtggcgtgatctcagctcactgcaacctctgcctcctaggttcaagtgattctcctgcctcagcctcctgagtagctaggattacaggtgcacaccatcatgcccggctaatttttgtatttttaatagagatggggtttcaccatgttggtgaggctggtgtcaaatcaaactcctcacctcatgatccgcctacctcagcctcccaaagtgctgggattacaggcgtgagcccgtgccaggccaagtaatttgttaagtgacacacagctgtcctctgtcttctgacatcaaatgtcttcctgtgctagctatatactgttggtctcaaattatcattatcttagccaaccgttctggaggacatctgtgtgctaggcattcttctaagtggtttatatgcagcagcagtaatagccaacatcttcttgccagatatccacttagtcttcaaagcaaccctatgtaatagatactattattattccaccatttagaaatgaataatctaagggacagggaagtcaagtaacttattcaaggtcagataactacaggaggctgctgcaagtgtcggtctttccatatccaaaatctggtgtcttagtcagtgaaaatgctgcaaaacctcaaaattgacagaggccaccctttagacataattgctacaggaatattgatcccatctcctcttgtatttcaaatcttcagagtgcattccacagccttttgcctgtggtatccaagaccatagaggcaagaatgtctgggaaatgtaggtgttagattgccagcctctgctgggtaagatggcagaagagcatagaggaaggtaaaaatgaatactgggtaccagtagacaatatctagcatactcgtgataatgatgtaagactactgccatttctttagaatgcgatcctggtgagatggccaatgaatgtttagtcactcagatatgcagtggtgtccccctaccactagggggagatgaacaaccggcatagtttgatgtcttaagaaagattatttgttcatgagtaatggaaaaaaatactgagaaagaagtggttgctttctatggcttatgaggagaagcttatgctgtctttaatgaaaaattaatcagataaacaaatgtccagaggaatatatccagatgtattcctatttacagtcacttagtggatgtgccagcatccaaatgcttccttaatctttcaactatctaagtaatgattgaatagaacctttgctccacctttcctgcttaaatgctactttattagcattacttcttgtccataaccatcattgcctaagtgctctgcaacttacctatttaaatactggatagattgtcatcagttcctcatctgaccaatcatttgtttcaccaattacttgcagattctcattctcgtaatggtcctaccatggaactgttgcatctccctgttttcctcaccacctccagctaatcagggtagagtttgctctaatgagcttatgtctcaggagggcaggtctttctgtgaaaaactgtcaaaactcttctaatgggaaacaaatattaatgtaaatgtaggcatttatttgccaaaagagtagtagctcaagaattgctagcaataattaccctacttgccagtgtattgtgtcttttttgattattcctctctttctatgtagagacctgcctaaaatatctcatgaatttttctccctcaagtgtgcatttgtgaagtttctcgaaagattgattggaacacaaggatttcagtttgtggcgtcctgttaatcaggtcagatttgttaaagtcattagtgttaaaaatttctttgtactcacaattctccttacccagagttagttctgtggcagtgtattagtgtgggcagggtatcttccatcaacttagtgtttttaatggagcttaccagagttaatgacagtggcagtccccccagggaaaacaagacagttggctcagatgtcttgtgggagctgaacctgctagaatgttcttctgggggtttcatcactaatctgccaacaactggagtctgtatcctattagtttctattcactgaagttgtgagatgccatgtactttctttttccagtcatctcatttttctcatcttctaattcgtgaaagggacacagaaatatttagaaaaattgggattctgcaaattgtgagattgattttcctatgttcatctcatagtgttcagattgagataaggtactaacttcactaagctcttaagttgtccactataagacaaagtcaatactacttccttggaaagaaataaggccatgatgagttaggttttcaccatgtgtaggttattctaagggtttcaggtctaatggcatcccctgaggtagtaggtagataagctggtcatcaggttagagcctgtattttgaatcaattcatgtgtagtccttacgaccattcattctacagattctggtatctgcccacctctcaggcccctctctcattgcgccctgtacccacagtactcatgctttgcccattctgaatcattttgaatcctaaattatacagtatactttatatttaatacatttctgaattttcaagtgccagctcctcccctcatttacctggtaaactccttaccttctaggtcttttctgattgtcttcttcttgttggtgtgctcaggttcctagtgtagcttatacctgattcaaccagaacacctatagcaatttattgccatcacttttgtgcagagctcctcttatataaccataggcccctgaaaggctggaccctctttgcatctcaagtcttcttcttccattccctgcctgccattagtggtgtctccatgcaggaagaagcatatccaaaaatattttaaattatgtaaatttcaataaagtatttatttcaaccctcagagaaaatgagatcagatttgtacagagatgtggttctcctcaattgtggtaagtttaatgggtgagaatgctgagcaagatttgcattgcatacaaatcacaggaattaggaccagtgattggaaagttcaaaggaagatttaagctcagtataagtaataactttctgggcattaagactgttcaaaaatggaatgtgctatcttttcaactagtgaggtctcaatgactggaagtatttgtaccaagactcataaggatgctatcatatatgttctcatattggtttggaagagatgcttggcagtatcttttctaatcttaagattctatttttatttctgtaaatcagttcaaatgttaacttcttataattgccaattatggcttttatattcatcattattcatttgatattcatcatcagttaaaatttttctattaatcagtcaatgaaaaaattatcttttgcctcactcttcagtgaatctggctgtccttggttgtccatatttcctttcacttctttctatatacactataaaattaatgagacttttaaaaatctttcaattttagtcaataaatatttgaatgttgggccagatgcagtgggaggtacaaagaagatataacattgattacagtagctagtgtttatcaagtgattactggcattttacatatatggactcatttgtttctcacaataatgctatatggtaggtactattttcccattttatagatgagaatcctgaggcacagaaagattaattaattttccaagatcatattgctcttagatggaagaacacaagcaatctaacctaaaatctgaaggtgtaaccattaagcattactgcctcttgatgaataaatttaataagataccatctcttgccttcaaagatgattccacctggtagaattacatgtatttattattcactggataaggctgttcttaattttacttgttgtaaaaatttattctttcaaacttgtctgcattgttatcacttgatagtgttctggcactggccaaacaaaaatccatgtttatctaatttacaccacttatgatattctaaacttgctgtgtaactatatatgtctagtttgaactcaaggtgatatgattgtatctccatgattatgttaattatccttccctgagacttctccatttaccttttgcttttgtggaaatcacaacagcatacaataatccaatgacaaatagaccttttgatttggatatagccatcgttcccacgtattaaatgcatactacatgcagaatgtctaggaggaagtagaagatacatacacccaacaaaagataccatgttagaagtacaaataaagcgatgttggacaaatgaagtgaaattagtagtcacagaaatgagattcaccaatatgcctttctgagcatcttcgttggtatttgttttggagtggtcattatgttggtaatctcacagtaggcaggtaataagttacagtgattcttcccaatcttgcctgaacagactcctcctgtaaacacagctgaaaccctagaaagtataatttagaaaagcaatttttaaattttaatatgcatcagattaaactgaaagatgaggtaaaacaccaattgatgggccccagccccagggtttccgattcagtagatgtgaggtcagtttcaagagtttgcatttgcactttgaaagagctggaataatactaagaatatgcataactcctgggtgtgcattagaatcacctgtgattctggtcacaaaaacaatcaccaaacttctaaataaagacccaaagctcttctaatattaaaccctgagataaatatgagctgtatatatactttaaaaagatgaataaaataagtaaaggaatcatttacccaatttttgatgaatacgtgagtggcagcagttgcggtggtaagttaaatcaggaataaatgtttgcaaagtgaaaattgtaagaagcatctcctcttaccatgcagtttataaacaatcacaaatagggcaggcttgctgagctccttcatacctggcgggttattgtcatgaatttgtatgattattgtgtactttacaaatttttgttttacaataatttgtatttattcattcattcattttccaacccatttattccagctcagccgtgaggatggctggagcctatcccagctgcttagggtccaaggtagtaaccagcctgggacaggatgtgatctcatcacagggaacacacacacacacacacacacacacacactcacactcagtcagattgggaccatttagacacaccagtgaacctcacgtgcacagctttgagaggggggaagaaactggagttccagagaaaacccacacagacatggggagaacatgcaaactccacacagacgttggccctggcaggaaattgattttttttcttcatgaacataatgaaatgctgttaaataaaatgatgtcgttcaaggacttgctgtaattaattgaggcttttagtatctccttttccaattatgttttccaattaccaaacattgctcatcacataatagatgctcaagtaatgtttgttaaacaaatgaatatctcttacgataaaaaatattgcaccaggtgggttgactgaccagatatttctaaccatgctggaatgacttatttctgacaaaaattattaattttattgatccaaaaggagccatgtaaaattgttttcctcttcttgcttgctattttcaatttttccaatttgggctcagctagcagtgccacagctgaaaaaagtgcatggattttaataaggactcctattgctgagaaggataataagtgagtctggagggcagggtcatactctcaaagcctttctgatgggagccaagattaaaatgcacagcaggctgagagggctgggaagaagctatgatttctcactgtggatttcctcagagtgccattagtgtaccaaggagaacacaggggagattgcatttacatgaggaaagcaagttagagttcagtgatcttgaattttttggcattatttcaattatttgttggaataatttaactttggcccaaaacatgtgtcttagtattgtatagatttgcagggcacagaatatttctggttttcccctaatgattgtcatggaatgcccttaaatttaatgaataagtgaatcccaagacaatggtatagaggtctctaattccaaacagtaatgtatttttgtgaaataaacaaggctcagtatttccattcgattcggtggcattgatggaatctgagcacattgggcacttcacaacacagtcatattcttattcaatcttcattagaaattcatgagataatcattgtgctattaacctcattatataggtgaggaaactaagtcactaaaagtttaaatgactggtccacatgaaaacagctgatgagtgatgagggctgtcaagacatctcaggttttttcttccctggctcaatgctgctctacccagcacctctgtggacaggaactccttttatcccccactcatttgatgagaagtatatgaggccagggaaaggcaagtgacatggccaagggcaaagggcaaggcattgtgagagtctgttcgggaatcacatctgaatctaaggagaaatccacatcgcctgccatcctaaagagatttcttagttgctccccctcctcattgggtctgtggtgtatttgtgaacaacagctgcatttgcaagtagccaggacttcctccagatgacatattgcgctgccagagtggagacaagcggggctgacttcacaggccaaagagggcatctgcatttgccactcagccccaattattcgaatctgctcatggcaggaggaatggtgggtcccttaggcacagaggccagcctctgatctccagactctctcatttctcctagatccgccccctcatgttgcttaagcaaaagcagggctaacccccgccccttggacaaggggcacatcattcctgcattccccaagcactctctggctgctgtatcagcaattggatgcttgcccaggctctgcaggactctagagtctagagcctgctggcccagaggcaagaggggtgccagatgtgcgagctagcaaaccgcggaagctactgtgagattagagtggcacagaaatagtcggaaaattaccctttccactgggcttggaatccagggtaactgaggcagcaaacaaacttctgtgtgtgtgaggtgtcccagtgtaccagtgtcctccattcgggggtgtcttcttcttggaaggaggactttttcttttaacccctaaagtgtcagggatctaaaagctggttggcaatacttgatgcctaaattgtggcctgggggtcacgatctcctgggtgctagttagaaatggggaatcccctggcccagtccagacctatggaatcaagatctgcattttaacaagatcccaaggtttatttgcatatttgagaaggcctgccctaaacaacactcatgagcctggggagaatcttaaaggcttgtgagacaacttgagggttgtgacacttcctaggtacttttgtagcctacactggtcctgtgtgattgggatctacgtctagcactgggtctgtggcgatactaacttccctgtctttcctggcccagactgacatttccaaagggctgcgtgaggtggtacatactcaggcaaggcattaacagtcacacaggcgctccagggctttctcctggcagtgcttgagccacgtggccctccatggagcacctatctctatcttggaccttttagttagaaagccaacagctgccctgcgtgggggaactgcacagtatgctaatgaaggagcagcatactgaaaatgatgttgtggctattaacatttttatgggtggactgctttgcaaagcatagggaaagtattactcttctaggattaatatatttaacaaaaagtctgccaggagaggaggtttttgctgataaatataattctgctgttgatttatttagtaatggagacttgaaattacaggaatcaatgtgtatatggaagccattgtcatttggttaattatgttttgccagcaggatggggaagcactttatgctcgatgcagccaaatgtatttcagccagaatcctgtgttataaatgacgaacacataaatgtagataaagagaaagacccctataattctagattcctggacacttgatcctccagaagcttgacatccctggccccctgcactggggctgtagcatgtagcataagtaggtctgcttcctctatagcaatactccttaacggggcttattttgcacccatgggatatttatagatgtctggagacattttgtttatcatagctgggcagggaagatgggcaacaagagagtagaggccaaggatgatgctgatgctaagtagacctacaaagcaaaagatggcccccacccccacccctaatgaagaattatttggctcaaagtatccatagttctaaggttgagaagccctattctagggcattcctatttgagattctgactcaaagaaatggggtgaagtccatattctctttgttgacaaataaagaaaataaggtgtgggcatcacatctggttatgtagtattatcttccaagatatccacccaggatggagtcaagatgagtgtatagtaggagagtctggaatagctctccaaccactgtcacttatctgaagaggtctaacactgtcaattggtcgccatcctattgtgaagatcatccccaaccttcctttccctacattctgatgaaccagctgtggtttggaaggcataaactttgctacagtcacagctgtgctatttactgagtgatcctgagagtggtaggcagtgtaatggccctcaaagttgctcacatcctaattcctggaagctgtgacctttcatggcgaaggggacttgcagatgtgatttagtcaaggatcttgaaaagggaagattcccctgaattttctgagggggtccttgtaagtagaagatgaagacaggggagtcagattcagagatttaaagatgcactgctgctgatcttgaagatggagtgaagctgaaggaaggagccatgagccaggcatgtgggaagttcctaggaaaaagaaaagacaaataatcagattcttccctagagcattcagatggaacacactcctgctgataccttgattttaacccccaaagactcattttatacttgtgatctccataactgtaagataaaagatgttagtggtaatttattacagcagcaatgggaaaccaatgcattaaggaaggcatttttccttttgaatgtcccactataaaatagggctttatccactataaaataggtgttgctcatttatttgttcctttattcattcaacaatcatttattgagtgcctactatgtgtccaccattctaggcacttgggagagagcagtggaccacagagaccaagcaactcctctaatctagtgacaggagactgataataaacttccaaaaaaatacagaaatctacagtgataaatgttatgaattcaagtgaagcagggtaaggcaaccggagtccacatctatttcttacaaatcattcagagcaggttctgtgataaggtgacatttagcaaaaacctcaaggaagtgggagagaaagtcatacagatattcaaaggaagaatatttttaatagaggaaatggcaagaatacattccctgagctaggagcttgattctgagattcaaagagcaagggaaccagtgttgataatgataataattacctcacaaggctggtatgagaattttgggcaacatacatgaaaccccctggtgaatttcaaaacactatgcaagtatttagtcatcattgcatggtccctcggagtgcattttgggggctgccaagggatgtgtagggtgacctttattttgtgtctatataaaagcgaaagggaaatagctattggcctcaggccatggaaattatgcacagaggcctagaaataggagtattttcccaacatggagctgatgattgatgatgattctatgtgtgtccttcacagtggcaaaccttcaaggggcagggacatcattgctgctgtagtccttaaaccctgtggtccagaagggtgctcccaaggtgccaaagggggcccagagcagtcggcttttctgtcatgggggcatacaaagagagaaatcatcaagaaattcaaagacctcaactcctgcctggccagggcccagagagaagcagttaggatagcctctgatacccagccttgccagcaactaatctgccagatgatgaaattgaaatatttgaaatataatccatacattctttttccaagacaggtggtgaaatggtctagtttttacaaaaggctgagaaaattaaaatactaaaatgttgcacatctttgtgtttgggagtaggacttcccctggaagctggggtggggattagagaaggcttcccctggaagctggggtggggattagagaagacacctctcagaatctagagctggcccattaacaccttaggtttaaggagctttctcagcccattttgtatttctaatcttaaaatgaccaaggcaaggtcacagataatatgtgtatttcatccttctttatgctgaagaatccgcttgtaactgaaaggtattttgtatattaattggattatcaggttagattctttttcctaaatgagtttctttaggccgtttctgcttgcttttaaaaaactttagttttaattttagatttaaatggtacaggtagaggtttattatatggatacattgcgcgatacggagatttgggcttctgatgatcctgttgcccaagtagtgaatacagaaccctgtaggtagtttttcaagccttggcccccttcctccctcctccgttttggttgacagagtctgcagtgtctaatgtccccatctttgtgtgtgtgtggacccaatgttcagctcctgcttgtaagtgagaatatgcagtatttagttttccatttctgtagtaattcacttaggataatggcctctagcttcatccgtattgttgcaaagaaccttatttcattgtttaaaatggctgcatggtattccatggtgtgtatgtgacacattttctttgtctaatccactgttgatgggcacctgggtggattccatgtctttgtgagtaatgctgtgatgaacatactagtgcaggtgtctcttggtatatactcagtaataggattgccagctgaatggtatttcacttttagttctttcagaaatctccaaactgcttttctttctttctttctttctttctttctttctttctttctttctttctttctttctttctttctttctttctttctttccttctttctttctttctttctttccttctttctttcttttaattatactttaagttctgggatacttgtacagaatgtgcaggtttgttacataggtatacatgggccatgatggtttgctgcacccatcaacctgtcacctacattaggtgtttctcctaatagtatccctcccctatccccctgcttcctaacaggccctagtgtgtgatgttcccctccctgtgtccatgtgttctcattgttcaactcccatttatgagtgagaacatgtggtgtttggttttccgttcctgtgttagtttgctgagaatgatggtttccagctttatccatgtccctgcagaggacatgaactcatcctttttaatggctgcatagtattccatggagtatatgtgccacattttctttatccagtctatcattgatgagcgtttgggttggttccaggtctttgctattgtgaatagtgctgcaataaacatacgtgtgtatgtgtctttatagtagaataatgtataatcctttggtaatataaccagtaatgggattgctgggtaaaatggtatttctggttctagattcttgaggaatcaccaaactgtcttccacaatggttgaactaatttacactcccaccaacagtgtaaaagcattcgtatttctccacatcctctccagcatctgttgtttcctgactttttaatgatcgccattctaacggcatgagatggtatctcattgtggttttgatttgcatttctcttaatgaccagtgatcatgagcttttttttcatatgtttgttggctgcataaatgtcttcttttgagaagtgtctgttcatatcctttgcccactttttgatgttttttttttcttgtaaatttgtttaagtttcttgtagattctggatattagccctttgtcagatggatagattgcagaaattttctcccattctgtaggttgcctgttcacagtgactgaactgatttgcattcccaccaacagtgtataagctttcccttttctctgcaacctcactaatatctgttttttttaattttttatagtagccattctgattggtatgagatggtgtctcattgtagttttgatttgcatctctgatgattagcaatgttgagcttttttcatatatttgttggccacttgtatgtcttgttttgagaagtgtctgttcagtttctttgcccactttttaatggggttatttgtggtttttttcttgttgacttaagttaatcttatagattctggatattagccctttgtcagatgcatagatgtaaatattttctctcattttgtaggtcgtctgtttactctgttgatcttttcttttgctgtgcagaagcccgtccgtttaattcagtcccgtttgtctatttttaattttgttgcatttgctttggggatcttcatcataacttatttgcctagtccaatgtctagcagagtatttattaggttttcttctagttgttctctatttttttgataaaataaatgcctacattttgcagaactgaaatattaatgtgtacatgttattgtctgagtaaactttgtttttttagactcatagtaacaaaaggaaaatagacatctttagcaactctttcagtaacagaacatcttttgtataacctgaacttttatgtcagttcaggaatataagaggaaaagaaaggaaggcttggcaagataggtagctccctatcaggagaaacgaaaatgaaaagaccgtcggatcagtgtatactctgagttctgtgggagctgagtctgtatcctagaaagcatggaaaagtagtctagggcagaaataaaccaggcatgctgccaggatgaacaactagaaaaaccctttggaaccatggtctgtcaaatgctgatgtgcaggcagcttcctctgtccccaaggtcagaagaaattcctatatcgctacttctttcttctcctcaacatctgaagcaaaaccctacagagtacaaaggtaaagtgaagacaaaacaagtccttctagcttcaaaatgctttgatattctttgtcttttattttcataagacttgatagcatgttaatgccacagaatagcaggattcccttccattatatgataaacatgctagtgaaaaagaattataaaaaaaagttttaacagaggaattatggcaacctatgagaattgcttcaagtggaatatatattcatgtattcatcaaagagttgtggtatccactagatgtcaggcattgagcaaaggattggacaaggggcaagtagggcaaggccctattctgggctcctggaattcataatataaatggcagcatagacaaatatgcaaatgaacaaatatgcagttgagttacaaattgtcaaaggtgttatgaaagaaacaaacatgatattctgctagagttatgactgacaggtaaagggtgagtacccaggaatggccttgctgagatttaatctgagagctgaatgatgagagggagccaagtatattgttataggtcagaaacagaaacaatttttactctggctcttctgggaagacatgaaagcctgtgtttacaaaaggagattttgacttacctagtcacatgatctaaagaaacgcttttactcttattcttctaaagcgacatttcctggtcccccaccctcctgaccacatttcatattctttttccctgcattatttttttctccccaggtattataaatatatgacatactttttcatttactaatttgcctggtttaatgtctgtctccaccactagaatgtaaactctataaggaacttgtttcatccattttgttcatgatggctgtctctactgcttagaagagtaaccggcacatagtagatactcaatgaatatgattcctgctatactaagctatttctttttgcccctggagagggagatatggaattttgaaaactgccaggtctggaagaatatgctatactttccaaggttgttagatttgaatgagaaaaatatacactaaagtgagttccatgctggtgtatagtaaaggctgagtaaatatcattcttgggtacttccctgtctcttttttcctaagcacactcagtgaggtgggagctgtgaaacgttatgaggtaggagaaggtgatgtctaatgtttctctactgccctgttggcgccccccaaccaagtctctctcagtgcctttgcccagccttcctctgcacacactacagctagctctatcatttcctcatgccccatcaagtcctacctgtcttcgcagaccctcaggttccttggctgtggcttacaagggacatctgattaatctgtaaccaattcatgttgatcccctagctgattgcctctttgtcaccatgaggccagctccttaccatgtgtgggtgcagcaagcaggtacaccatcaccctgcttgtgggatcaggctccttctcccccggacagtgatgaggagacactgtcttcatttgcctctttacctttcccattttaaagctgttgactaacttcaaaaagaatctttttgaattccttttactcatagaaagcagaacaatggaatagtaaggaagaaaagagaaatcaaggctgcagaagagaagacagaggcacagggagagcacagagtagagagtaaggggtaagagaagagaagacaggagaaaagagaatgaataaaagaacaagagagaagagaagcagtgggtaaacagcctgttagatggtggcatagcttttacccactgaaaagatgttcacagcaaggtctatcaaaaccctaccacagtatagcagctctaccttgaaatagtatttctaatgataaaaataataacacaataaagtttagtaaacagtatgctaagagctttgcatatgttttctcctccatgatccttttgattgaaggcaaattttgtcatcctatgctcaaaattcttcagtcacctctcatcttactctgagtaaaaggatggggatctgctccccaccctttcttccaagtaggacccattcctcagccccagctcagacagtatgcccctcccactctctctcttgctccctccattccacacacactggtctccttgctatttttgatcaaaccaattgtccttcctcagggcctttgcactggctattgttttgcctggaagagtcttctcttagatgtcctcctgactctctcccttacatcctgtgggggacttcttcctttgcttcttaagcaaaagtctcccatggccaccccctataaaatgtcagcccccactaccatctcttcctcctgctagctactcccccactttgctttaattttctccatactacttatcaccaccaggggtataatgttattttatgtcaattgtttgtcttttgcctccagattatgagtacagggattatgtcagctttcttcttgattcatacatcgtcggcacttacccctcgaaggtggatactgtttttccttccgtagtagaggggaaaaagtaagctcacaccaggtaagtaaattttccaaggtcacagacaggaggtggtgaagccaggtttccaacagagctgtgtccatgtccaaggcccatgctttcaaccactgtgctagaggattccccaacggctttccacactgttaggacacctgtccgaaagggtaggttggcatttcaggagatgcctttctgtgctcagtcaagatcaatgcagatgtaattgtgtaaagcaagacaggactataaggcagatataactgcgtaaagcaaaacatagacttataaggcaaggttggtacaaatgcacatggctaaagcttgacctgtacgatttactttggctgcaatgcacagctacagaggcagtggggtatggtgtgtggtggttaaggacatacgttttgtgagatagatgtggcttccaattcctacggtgccactacttagttttgagaccttggccaagttacataatgctcctgagcacccagttccttctacatgaaatggggctggataaatggaaataatgcctacccttagagttgacttaaaaattaaataagggaatgtatacactgttcttagcatagtccctggctcatgtaaatattcaataaacactaaataaattactattattataattattatgacgtttacttagtatatagacgtagagaaagttttagttgaaattgtatctgttaatacattattattttctgttaagaatgaatatctacatttggaaatagaacaaaaaaagagcttactgcatatcctttcactgtcatgccacagcattgtctaatgagccgtccgtcctaagggtcatctcactctgtcagacaatgtaattttgtttggcttaaaattaccactgattacagtctagcctctgcaaagttgatgttagcatgtagaaaattaataagatgcaaatcactgctgtccaatagagaggcaaatgatttctaacaatagagaataaaacagtagagaataaaatgttaggattttattgccctttagactattaagcagttttggatatatgacttaaaaacgttattccagcagtcttttccccatccatccattcatccacccacccacttacttacctacttacctatctcagtttcttgcattctccttgaatccactttattattttgttggttcctttattaatgattttaatatatctttgatacatccccctatgtatttgtatgagaataagtttatatatatatataccaaaatacaatacaatacttacataatatagatgtactcctagaaagcaattgatggtatctaagctatttaatcttggcaaaccctatcagatacctagtttctgtgctgctactcctgatgatattgactccttataagttttactgtacttttgcttactaaatatcagaaaggtataacatagtgtttaagatcagtggctctggagtcaaacttcctgggttcaagctcttgctctatctatcactaattagctctatgatcttggaaagttgcttaacctaccaacaaaatgaggccatatgaatacctcttatctcagagaatattttgaggagtaaatgcaataatgtatataaaagtgcttagcatggtgcctggtccatggtgtttaataagtattggttattatgatttatgattgatcttcattttggaacttaataaagaaaatgaaactttgcaattctattgtgaatgtttgattttaatacttcctcagcaaactctggtagtaattgcataatacgacaactgtttttcgtagaagcctaccaactagaagttctgaaagcaagtgtttaccatgaaaggtgtttaactcttagagagccctacaaattaaaatagcctacacagaatacaactgaaaaatggcctctactgtttattttctaactttctacactatggtacagagataacttattgtttagtagtgactggtctagtctgttttattgacttgtgcactttctgaccctgtctaatttagtgtcagagatcacctgtgatttttgtatatttccgaatgtgtaagtatctttcccagtaacttgtacattctgatttcctttgcacatgagaattgatgtggaaaaggcagctgagcagaggttggcaacctttctgaagtgctatgccaacttcccatttattcactctaatttaaggttttccatgccaggatgaacctcctatcatccaaaccactggagactgagaacttccaagacagagcaaggctacagaaattgaaattttcattgtatgatagattttccaactttttttctttcctgaaaaccaagaactttgaaaatgctgatgccaattttatgcaacccagacagaacgatcatatatgtagggaaggggttggtgaagattgcagttccaaaacctcctgaagcttttcatacaacatttattcattcatgcatgcatgcctatatatatatatatgcattgtgcattcatttagtaattcattcattaaatcaatgttgagcgtctaacaatgtgccagccactctggttatgtatttacatatacaatacttaacttttttgactaagtgagagaacatacttcatgcacgtagcagagtgcctggctcatagtacatactcagtaatgaaaaccattagttttaatcttctgtttaaaattttacaaaagtaataaatgtacatagtaaagaatctaatagtgcagaagagttgaaataaaaagcagcaattccccatgctgcttctgttttctcccaatcatattctccagagccttaattttaaaaaaatcagttcttctgatatttacatatgtaacattaaataatgcaagtaccagtggtgtgtatcctcccctagactctcatagggaaattctctgcttgttcagcctaggttcaccttggccaggggtagagttccctcttatcacttttctaatgagattcttaaaagtgtccatgactgttgaacaccagacttgttgtctaggggaataaattggcgtggaggagaccactctggaggacagctcatcttctaagtcctttttgcatgcactgctttccagacctgtgtggaaggcaatatccttttcatcccttcagaatttcttctctcttcttgttgcctcttgcttttcttacatgtttctctgtgttctgggctttccaagaaaaaacaccctgaaagcctcttagtctggctttttgaatttttgttttcccccttggtaaggactgggggtggtatggcaagaggaaaatgacccaaaagatttggagggaaatgcgcagaaaacagctagattaatatttcaagatagaaccatcctgatatattttcttattttactattctttgatttatcaacttcagacattatttattgactcctctctataaaaaaggaggatttatctcatgcttctttctatctgctcctctccttcccaaagttggatcattatgttagcattttggttcttctgttgtttctctttctaggtttaaataacaaacttagatctctttgcatcaccttgaggcagtgtctcttgtctgtccagcaagatgagggtatttgctcccctatgcttttctcccctttttcattgtcaaggttgctagtgttctattctatagatgtatttaaagtttctaagttttatatatagatagcttgactataaaagttgaaaaatggtatacaagatttattttataatgtcgcttagaaaaatttgaaaattgactgtgtattagaaattattcactcaaatgcattattcatgtaacatttctgttggttttttttcaacataaaaatttcaagagaaaacctagctcatttcaaaatccagattttaaaaaggttatttttgatttttattttttaaagcaacggggtctccctatgttgcccaggctggtcttgaactcctgggcttgagtgatctttccttctgagcctcctgagtagctaagatgacaggcgcacatcactgtccctagcacaaaatccaaattttcaaacaagttttaaataggtaaactttatcatgcttttatctccctcacaagatttactaagcattgggttcaaaaagaaatatttaagctttaatttttaaaggaataactactgacagttaataatattaagaaaaagaacatgaaaatgtcttttgaatgacacattttaaaaacattagtttgaatccgatttcttcagttcaagtgcaattaatagtctaataaaagaatcatcaataagatgggtaaatgtgtgaatcatgtcttagatttttaaactaagacaagttgaaaataaacacattttctggcttcatagataagccttgtgttatatcaactctgtgacatagattaaaattacaataatggattaaaagtattattttatctcatctaaaacatgtaatattagtactgtaatgtcttttagtacttacactaatatatgggctgacagtggtgaaacaaatactaggttcctgaagctttcctaagcattataattctgatatatgatcatattattttcaacaccacatctcaattttctgacacattttttacttttataattctaggatttgcagcatcacattcttctctaactccttgcttatgtgactaagaaaagtgtttaactaagtacaaaagttcagagtgtaacttagtgttaagaagtaagccagattttgtcccagatcttacatactaatcagctttcactgagagattaatttactagaatttcttttgagtgtgcgtgtctccattcatacaaagattcggctacatttttcttttttgtgtattagctttgtcaagtttggcattaggcttatgctggttttataaaatgaataactttctatctttttgttcagcctgggaacaaattatgtagcatagtcattttttgaagatttcaaagaacgtttttcaaagaaatgtgtgggcctaaatatccttttggaaatatttcatttataacattttcaaacattttcataattatctatattgttttaaactccttcctgagtcagttttaaacacttgcacattcccagaaaattctctttttatctaaattttcaatttttttagtataaagactatatggagatctgtgatatactttaaaactactataacttttttttataacttctaacttgttttgtgctttctttttttgtctttgttagagtctccatgtttgcccattttgttcgtttttctgacagcctagctgttgaatttatttgtccactttagaattaaaatattgccaaatttattcttataattaaaattttttcagagtttatgagaagtaggataatcatatatcccagttgcctggcatattctggtatatgccttctatcccaacgtaattattagtagtactctctttcctccccaaaatacatcagttgggtaataaattatgtggccactctaatgataagtgaaacatacattttcctctcaatacaatagcaggctataattacaatgcataattataattacagatattgtctcatcccctgggatgtgaaaattcatgttgaggaggttggggtgggggaaggtcaaaaggcttttgatattataaatgtttgtggccatccgaagggccatagtacctaagtagataacgagtttaactgcagtatcaaatttcatgtgggagggggtataagtaggataaaattgtcttaaccaggctccttagagggacaataatgaaaaaagaaaaggttgagaaaaatgttataatgctgtttgaataccaccattgattagttcattttatttttctccttaatagtcatttggtgttttctaatttgtaagtaaatatagtttctgtttaaacaataagttattgtttcaacactgaaatacccttgttgacatcatcagtggtcaacattgtcaacacattgttctgtgtttttggctgactctgcttttcaataccgtctgtccaacttgactatttcctcctttttttttttattgagaatattattgggctcataggattaaatgaaataagatagtaaggcattcagaactgtgcctgtccctcctgctttccctctgtctcactggttattttcaaactttttggtttccttttttttttttttttttttttacctccggccaatctctaattgctggagtgctaaagagcttgagctctttttcttctctatctgcattttattcctgaatgacctaatctaattacattgctttaactccttctgtataactttatacctccagccctgactcgtaccatgagcctctgacttgtatattccattacctgcttgatatttccatgtggatgtataataattatcagaattaggtacaggctcaaaactgaatttttttcttcacatctgttctacattcctcctcgttcctataaatggtattgccattcactcagtttcttaagtcaaaaacctaagatgcattctagacatttctctgtctgccttcctccacattccatctgccatcatgccagctggttatatcaccaaacctgtccacttctcttgattttccttgttactctaatccaagacaccatctgctgtcacctacattctccactggtctcctgcttccactctcatcttccagccctcaccctcatcatccattctccaaagagatctcttaaatatacaactagaattactccactccccttcttaaattctttattgggctttcactgcagtcagaataaacactgaactctgtatcatggccaataaagaaccatgctcccatctcctctccagccaccctggccttctattctcttaacatgcctaaccagtttctgtcatgggcttgcttgctgtttcctctccctgtacgttcttcgggcccacgcgtttctgtggctggccattcttgtctgagcagtctcagctcagttgccaccccttcagagaggcttccaacctggcaccataactaatgtcagctcctttctaccaatgattattgagttgccctgcccaacttttttttttgtcaaatcattgttcgtttgttttgaactggagtgtttattgcagaaatttggccaaggttccaattgagtgactccagctgaggttagactggggccccttgcccagggctgggcacctgagacaggaaacagtgaagggatctgggcctcagagctgtgagatagaactggggaccaggctgcaggtgaggcctgtatggtcaggttcatgcaaggccttcaccacaccatcctctatcaccaggaagaacctctcaagctctcatcctcaaagagtggcaacagcaaatcatctagtaacaaatcagtctccttcccagaggccccagggctgccacccatgagctggccttggccttctgcactgtggcctgtccccactcaccagtcacaaagacacaaagacagtggcacttaaacatggatctggcccccctttaccttcagaaccccagcctactccccaaacccaagcaggtgggtctttgacagttggggtgaaagccccagggattctaaacagcacacccttctttccctggcatagttctgtcaggtccaccttgttcccaggctccctttcaaacaccactaatgccaggatagcatctcccaccatgacaggtgccatggctgcaaagttactgctgaaatcgtgggtccccaagcatccactctccttctctttctagtagtcacgctgctcctgctgctgctgttgctaccactgctcctgctgctatgattctatcatagcagccccagtgaggaccaacccagttcaatgtttcagggcgcacagttgtgccagctccaggctgggccctgtggctgcgacagtcctgtctctgtggttaggcaccacctatcctattcagccttcttagggttatcttagtatttggtatagctccttcttttctgttgtcctcccagcgctatcatgtcagttccgtgaaaaaagagacctgtttcttcattcacaatgcacatgttctcagtacctggaacagctcctgtcccacagtaggtatttgtgtgtatattttatgtaatagatttttggcttaattctcatggagtcaaatgatgaatgtgaaattcttaaatgctgaaggtttgctgtatttagaagtttttgttgactgatgggttggttggttggctttaaagtgaagtaatccatcaggttttatgtatgtgaacttttatggaatttggtgaagtgtgtgcctgtgtagattagtatataggagagaagtttttatttcttttcagatgattagttatgctttgccagtatttcctcagaacttctaagagtgttggtttggggggatgtattcagtattgacaattccacgtttatctacattcagctgtcaggttggttatttaaccattccgaggcttttcttttctattatggtcacttaaaacaaagtaaagcaaaatgaaactagactgttttggtaagcttttattgaaataagaggggaaaatgtaaggggtaaaaattgctaaattatttgaaattatttttggatgcagaggttgactttattgactgaaacagaatttaagtccttagcatcttatctggatgttaagaattgcctatcttttggttgtttccagaacaatcatgtaggttcctttttgcttagactgaaaatgatttgggatgaagtaaaaaattcactccctcacaatggattaattttttttctcagtggagatgccatgcggtcagaatttcttgaaaatgacccacaagcttactactaagcagctttgggccaatgagcagtcttttaaagaaaacattttatttatttttctaattggagaataatctatgttcattgtaaagaaagaaaatagaaattatgtatattcctaccaaagacaatttccattttagtgtatttcctttcagttctttttctgatatactatcttttctcttctgctttgagatgtgcattgtgacttccctttgtgataaagaggataaatctgctggctcatttccttttatagactgccaccttctctaccaacgaagaaaatgtgcattttggattttgcttgagttgaaacaatttatgctggaacaattataaaaagtagcatctgtaatgtgaatttggcccactctgtatcagaaaaaaataacttccaccatagcccgagaggaaactttaggtatctatcaccgatagagccaatgcttttaatacatatttcatgatcacagctgaggcttttccaaactcagagtgctgtatcattcattcactcctttaaactacaagattatttttggctctttgtgttggcacataggcctttccattgctgatctgcatgaaccatttatcaagtcaagggtttaatctatcaaagtcagagtttcttttttctgcctgtctctgtctcgctttcccagatggtattgtctcatatgtgtacactgttggcttaaaaaaggctatttggaatgcaaaggtttatcaagtttctccattttttttcaaaataatatattatggagcaaagtgatattttataggcaataataattatagtgttgatcaggttctaaaacattacattaactataatgtcccaaacctccttcttggctaatattctggttccgttcttgccagtagctcctattttctctactcactcattctgaaaacttgaatcatctttgattttcctctctcccctttccaaacatttattgaattgtcaaattatttggattgtatctcctggatatttcttgaatccatcctccattgcctttgtgtactggactcatgatgttgcctgttgtcttcaaagaagcaggcaattcattttgaatgcttttgatcggatccaaatataaaggccaaaacaaattaagtaatttatttaataacactgactccttgccgcatgccaacccccgatctagactctggtgatatagcaatgaacagtagggttaaaaaaaaaaaaaaaaaaaaagcctaatagaatttacatgccagtgcaggaacaggggagaaagggacaaaaataacactagtaagtaaattataggatgttggatttgttaatgttgttatgaggaaaagtaaagggatgaaaggctgcagtgagacctagggtggacagggaagggttagagttaaatcaggtggtagggatgataatgaaagttaactaaaacttaaacaggcatcataaacaaagagaatacatcaaaaagcattctaattatgtcagctagtgtcctgaatcccccagtcctgatacctaggatacatagataatgcacagggatcttcgatgcctgagcataacgcaatgagaactattataatagccaccaagctgttctccctctctttgagccattcccttcccaggtcagcactttcagcaaaaccgtattgcggtctaaacataagaattgtgcttaggagaaagtgctaaagttgattcaaagaggcatgtccacaataggtaacccaaggtacgcaagaagaaattccaggggccacagtaagactcaaatcaaaatcaagaataatatttagtgaattcttactgtcaaatgaaaaagtctaaagtctttagcctaatattcatggctctccagaaaatagcttaatgctagttttcttttttcttttctttttctttttttttttttttttttcatttttgagaccgagtcttactctgttacccaggctggagtgcagtggcgtaatctcaactcactgcaacctccgcctcctgggttcaagtgattctcataattcagcctcccaagtatctggatttacaggcatacaccaccatgcccagctacttttttgtatttttagtagagacagggttttgccgtgttggccaggctggtctcaaactcctgaccccaggtgatcaacccgccttggcctccaaaagaccatgctggttttccaaccttatttcctagcactcatcttcacatccttccacatgtcttccaatttccttccttgttgtctttatttggatggaagatcttctaccacatttttaggttccaaattctatccttccagtgggactcagatcagatgtttcctcttgtatgaaagcttgacagaaatcatcacctcctctttagaatgttaataacaaactcttttctggcatctggtattatatttactatatgtgtgtgcctcaacatttctgttagactaaagctctttgagggtagccatctggtccggctgttctttgatcctttccccttggcccacacagtgttcagcacagatgagggaatgataacaaagtgctcagtggtattttcaatggcctagtttttcaatggcaattcaaaaatattgttgcactggagtgcctccagatgaaggtcctagaaatggtaaaatgtcatgaaatacctaatcagtcaaagacagggaatgtttagcttggagaagagaaaagtaataataggcaaattttttcagtattcagccccctacctgcctccctgccaacatactacacctttttcattatttttattaactgaccttctggctatattcatcagtgctcaccacttctttttttaaaaaaccattttctcccctcagtgcatagggtatgtctcgaatctctccatctcttttgctggcttttttgcccctatcgaatctttaaatgttagaatctaagctcagtcttagatgccctattctcagttctgattaatcgatgcttgtggcttcaattttaacctacatggtggagattcacaaaagcatacattcaacccaggcaagatgtcagaacttccaactaccaactcaacatctctctgaaaatgcttcagaggacccaacatgtacatatggaactcacgaaacctttccacactttctaattttaatgaatgactttgcagccttccctgtattaagtcaaaattctggaagtcacccttgacagcttcttctcccttactccttataaaaaatccatttccaagcctctagtttttacctcctaatgtatctaaaatctacttagagatagatcatttcctcatataggacaccactgtcccttgcttacctagatttctgcaaaaactaggctacccccatccacatttgcctcctccactctgttcttcactcctctacagttaccatggtgattttttgaaatgcagattttattgccttatttccctgggtaagagtctccgggattcttctgtgccatctctaaactcctctgaatatggcccacaggtctctgcttcatctggacctccctgccactccaacctcatctcataccatgttgctcttatcttcctttggttcatccttcaaacatagaggacaaactgcgtcttctgtctgggatgctcttctcttctgtttccacctatttagatcttttacctcttagatcaatcatcattcccttgaagaagcaccttctgatcttcctgaatagatcaaatccactattagagtctgtactggcatcaggttattaaaatacatattgcaattgtaattttacatttattgctgagtatttctgagagtagggtaggaagaaggagagctgcaagacatgaaacaagagaggacctagggaccagaatatgaagcacttagtaaaccatgttaagacattttggatattatcctgaagacagtggggaaccattttaagaggaaatgacaggatcctattaacatttaaaaaatatagtggttgaattatgtccctccataatttttatgttgaagtatcaatcctgttacctcaggatgtgaacttatttggaaattaggttattgcagatgtaagatgtagtaggatgagtaagattagtaagatgaggtcatactgtagcagagtgagcccctaaaccaataagacttgtgtccttatttttaaaaatatcatgcggaaagatataaattcacacaggaagaatgctatgtgaagactggggttatgtttccacagatcacggaactaccagaagttagcagagaggcctggaatagattcttccctagtaccttcagaggtagcatagttctgccaacacattgatctcaaactatagattccagaactgggagacaatagaatgcagttatttaagccactcagtttctaatactttgttacagcagccctagaaaactgatatagtaaggataattctggctgcagtgtagagaatgttttggaagtgggtaaaactgaatatggtgagacaatttgaggctactaatataagagatgacagcagctgtggaaaagattagagaactaatttgcaagtagaatcaatgaagataggtgaatgattagacttacagagtggagagaagaatggcttgagaaatgatggaggattttaaatcccatttattgagtgatgactcccaaacatacatctttagctaagacttctcttcagtcttccagattcttatatccaaatgccagttaagctacacttggtttttccacagtcgctttgatgaatgtttaaagaaagaaattggtaactaatagttaataagagctaccatatagattacaaaggagaattaatgtattatttatctgaataactgtatgttaaaggaagataaactttcattctacctgggaaagagcttttaatcaaccatagctcccaggaatagaatggaatagaaaacctacccttgtgaggtagacttctgtctctgattacttcatgcagggtctaaatgtccataagtctacaacttcagcctgtttatccttctttttttcattcacatggttctttgtttacagctctcatgttgttctctttacattcaggttatatagaggcctgtgatagtcctcatatgatggtaaggtttctcacagcaaagaccaagctttgttaattttgtcagcatatggtgcctaacactaagctgtatacctaaccagttaataactgctgctttgttgagaatgaaaaagtttaggccccaatttcaaatattttctaccccaactatgttatgcaatatattaatactaaatatgccagtctattttcttgcttagtaataaaaatacaacgtgttgagataaaatatttctggtagctaatcaatattccagttctcaattatccatgctagattatattatgcattaatttgattgcatgctctgcagtatattgtgtatgtgttgtgcaaaggcataattgctcatgttcatacataataagtaggtttgggaatttgtctggaggtatatcttagttattaatagtgattgtcaagtgcacatttcaagtttagaacctcgttggccttctgggagtcagagtctcaatttcaaggaaaatttaaacctttcctttcatgtattcctgttcacttaatcctgtcaaaatagaagattttgtgtctaagaagaaagagctagaggctaattaaaggagtgaaggccagggtttcatggacctctgatttctctccaaatgagtgatgaattaaatgtaaataagtcagaaacataccttaggttttgcttttttttttaattgttataaaaaattaatgtaaaatttagcatcttaaccattcttaagtgtacagttcagtagtatgaagcatatctgcattgttataaaatagatcttcagaagttttttcatcttgcagaactaaaactccatacacattaaacaactccccattcccctgtcccctcatttctctcttggtaactaccattctcctttctgtttttatgaaattgactactttagatgctgcactactgcatggaaccatgcagtactggtttttttggtgactggcttatttcattttatataatgttcttaaggatcattcatgttgtagcatgtgacttgatttccctcctatttcccatataatattccattttacatatataccacattttgtttaaccattcatctgtctataaacatgtgggttgcttccacttcttgactattgtgaatttcttttttaactaagtgtatttgaaaatatacagtttctgtatcggttccattttaaattttctctctatgaagatgaaggaagaatatttttatacacttgaaaacttaaaactctttgtcacttaagccttctgtattagtacattctcatactgctataaagaaatacctgagggccaggcatggtggcttatgcctgtaatcccagcactttgggatgctgaagcaggtggatcacctgaggtcaggggtttgagaccagcctgtccaacttggtgaaatcccatctctactaaatatacaaaaattagcctggcatggtggcacacgactgtaatcccagctactcgggaggctgaagcaggagaatcacttgaacccaggaggtgaaggttgcagtgcgctgagatcacgccactgcactccagcctgggcaacagagtgagactctgtatcaaaaaaaaaaaaaaaaaaagagagaaagaaagatacctgagactgggtaatttataaagaaaagaggtttaattggctctgggttccataggctgtacaggaagcatgacactggcatctgctctgcttctgagaaggccccaggaactttacaataataatggaagacaaaaagggggatccagcacttcacatggccagagcaggaagaagagaggcggaagtgctacacatgtttaaacaaccggatctcttgacaactcactcattatcaccaagacaataccaagggggatggtgttaaactattcaggagaaactgctcccatggtgcaattacctcccaccagaccccatctgcaatatgagggattacagttcgatgtgagatttggtagggacgtagatccaaaccatatcattccacccctggcctcccaaatctcatgtccttttcacattgaaaaatacaaccatcctgtctcaacagtcccccaaagtcttaactcatttcagcattaactcaacagtccgaagtccaaagtctcatctgagacaaggctcatactttctgcctatgagcctgtgaaatcaaaaacaagttacttacttccaagatacaatggggttatagacattgggtaaatactcccattacaaaagggataaattggccaaaacaaagggctacaggccccaggcaagtcctaaacccaacagggcagtcattacattttaaagcttcaaagtaatctcctttgactccatgtctcacatctgggacacactgatgcaaggggtgggcccccaaggccttgggcagctctgtccatgtggctttgcagggttcagcccccatggctgctctcttgggccagtgctgagtgcctgcagcttttccaggtgcagggtgcaagctgtcagtagatctaccattctggggtctggaggacagtggctgtcttctcacagctcctctaggcagtgccccagcagggactctgaacatgggctccaactccacatctctcctccacattgccctggtaaaggttctccatgagggatctgctcctgcaacaggcttcttcctagacatccaggcttttcttttctaccacatggacaggctgcaaattttctaaacttttatgctgtgcttcccttttaaatataagttccagttttaggtaatttctttgctcacacatttgagcataggttgttattaacagctgggccacatatcgtacactttgctgtttagaaatttctcccactagatactgtaaatcatcactctcatgttcaaagttccacagatccctggagcaggggcacaatgcagccaggttctttgctaaggcattgcaaaaatgacatttactccagttcccaataagttcctcatttccatctgagaccttcttggcctggacttcattgttcacatcactatcagcacttttgttgaaaccattcaacaagtctatcggaagttccaaacattccctcatcttcctttcttcttctgagccctccaactgttccaatctctatccattacccagctctaaagttgtttcatattcaggtatctttatagcaatgccccattctgtattaattttatgtattagtcagttcttgtgctactataaagtaatacccgagactgggtaatttataaagaaaataggtttaattgatccacagttctacaggctatgcaggaagcatgatgctggcatctcgtctgcttctggggaggcctcaggaaccttacaatcatggcggaaagcaaaaagggggagttggcacttcacatggctgaagcaggaagaagagagagaggagagaggtgctacacacttttaaacaaccagatctccttagaactcactcattttcaagaaaataccaagggggatggcattaaactattcatgataatcttccctcatgattcagtcacctcccaccagccccacctcccacattagggattacaattcaacatgagatttattggaaatacagacccaaagcaccttagcttcttattgtagattgttattctctgataaaaactggtaccaaatatttttagacagaataatattatgaaagtcagtacaaggaacgtataaaactctgaaaacagatattagatttgtttggcagattggtgaataggcaatggaagtgaatgactctttatctcctgaaggaccaaggaggctttgaagagaattactaagacacactcataccttttaaaaagtaactcttggtcaggcgcggtggctcatgcctataatcccagcactttgggaggctgaggtgggtggatcacctgaagtcaggagtttgagactagcctggccaacatggcaaaaaccccatctctactttaaaaaatacaaaagttagcagggtgtggtggcaggtgcctgtaatcccagctactcgagaggctgaggtagaagagtcacttgaacccaggaggtggaggttgcagtgagccgagatggtggcactgcactccagcctgggtgacagagcgagactccacctaaataaaataaaataaataaaataaaaaataattcttcaaaattcaatattttccaaacttattagaatctacaaggaactcaacaagaaaaaaaaacctcattaaaaagcaggcaaaagacatgaaaagacatttctcaaaagaagacatacaagtggccaagaaacatatgaaaaaatgctcaatatcactaattatgagagaaatgtaaactaaaaccacaatgaaatatcatttcataccagtcagaatgactgttaaaaagtcggaaaatgacaaatgttggaagatgtagataaaaagatatgcttatacactattggtgggaatgcaacttagttcaggcactatggaaagcaatttggagacttctcaaagaactaaaaatagcactaccatttgacccagcaatcccactattgggtatacagccaaaagaaaagaaattatatttaaaaaacacctgcattcatatatttatcacagcaccattcacaatagcaaagtcatgaaaacaacctaagtgttcatcaatagtggattggataaagaaaatgtggtacatatataccatggaatactacgcagccatagacaaaaaatgaaaccatgtactttgcagtaacatggatggagctggaggccattatcctaagtgaaatagttcagaaactgaaaatcaaatactgtgtattcttccttataagtgggagctaaacagtgggtacccatggacatatagaaggaaataatagacactggggactccaaaaggtggaaagtggttgggtgtgagggttgaaaaactacctcttgggtacagtgttcactatttgagtgatgggtacacaagaaacccaaactccaacattatgcaatatatccatgtaacaaacctgcacgtttacttcctgaatctaaaataaaataatatttcaaatttaacttcttttccacctttattaaaggtaaagctattacttttgttttaacactatagtgaatagaattttctgtgttgttttaaataattccgtgatctaagtatctgatgcagagatctttaccaatgaacatcaatggtttttccacaaaattaagatcttttctaagatgaatttacaagggctttgagtgtgtatgtaaaaataagtcctagaattcttttacaataatgacaagcatggcctttcaatttttcaacattctgaaaattgataaacaaagtcatttaccctgtctctaattttctgaagattagattcattagtttaactcatggttatagtttttgtgtcaaccgtattgatgtatacatcaataaacacaatctttcactttcactcactcttctgtctcctccatctccttccagttcctacattattcagaatccttggcaattcatatgtgttaggtgtgaagatatggaattgtcagcatcaggaaaagctattaccttgctacttcagactgagtctttctcttttctttgtttactttagatgatttcttttttttaaagactgagttcttgaattcttattctctgacttgcttcataatccatttcagaatttcttgctcctacactttgtttctttatgaatcagtctgtgcatgagatattccatttttaacccagcttaaatttctccaatgtacccttgttttgctttcaagacagttagcaactctgaattcaagcctatgatcttcttttagaaacctgatctgactgactcctgcaaaattctaccttttttcctggctcttaatttagctttgaaaatgaagtacatactatttatctggttatacattttaaagtagattctaagtgcaaaaaatgtgcctagtcaattcaagttgactcctgattttttgaaaaaacattaagaattgaataacaagaataagaataaatataaggctactgactgaaatgtgatctttctcttattttgaacatcttatttcacaaagttctaagtccttttctatttggcttgaccgcttccatatgatcatggatataaaacgattaaacagaaagttcacattcagcaaatatcaaggtgttcttaatatcgtaacttgaaatcaatgaagaagtcacattttctgctttgtaaaaactgcctcacatgtccctggtctggcaaaaaatacacacacaagtactgaaaacagaagatgatagcaccagctaaatagcaccattgctaggcataagatttgaaagccagcactttgcagggaaaatttgagtaaacaacctctgtggaaatacagttaattaaatctcgattctataaactgtgaaccaaagtttatataaaagagagactaagaagtctttgttgtaagtattaaaaattctgacataaggaagtgaccactctagccatatcagtgtcagaaaatgacagtgtggggctccaaggctgagaatcagtggggctgcaaaatctggacaaagaaaggcagaacaagacatagactacagaaaagagaacattatctgagcaataccaggctaatcccttggtgtgaagaaaataggagttaataccaaaaacatatggctcattattcatgtaattatgcttgcaagctatatagtaaactatatgtgaaattttcataccatagtataaattcagtcattagtttttccttttcatatatacattaagtaaatatgtattgaggaccctcagatgtctcaggcatggacctataatggtgaaggattcagctttgccctcaaggatcttacaggaatggggcagatggcaaggaaagaaacaataccgtgtggtaagcacagggcactaggggaacaggaagtagtgatctatttatctggatccttgtgggcagaggaaataaacataactaagaacaatgaatgataagtttacaggagggtaggggagaagattccaagtagaagcatcgtactaaattttgagtggggcaaaagttcagtgaaacttttatttttattataaacccaccaaagtaaaagttctcagcttacatattatagatagctctctgaactggatgaatgtcagctgtgatttcaatcaagcaatgatgatatggccagatggagtgtgccacctcccttcagcattttgtcttaagagggtttctaatatggcttgtcagacagtatgtgtattccgtgtgttgctggaaatttgaagctaccgtctagaaacaaaggtcttggtctcagcagcattcagtgagttggtgccccccagtaccttggataaaaaaatgtatcctataaagggctccatgaagcacaaatgtaaaaacatgctacaaaagcatctcttcttttcattgtgccacaggggctatcactgtgagtctgacttgcaaagtgcacagcaaagcgaacctgtggtctcactactttgctttatactattgcccactccagcacctgcataaggctgaaggatatccaccaagagaatgctcatcactttgccaactgccctctgtgctctagcccagggtgggcattttttttttctgtgaagaccagctggcaaatattctaggtttcatgtaccttacagtctctgtgacagctaatcaactctgccgtcgtagagaaaaccagcacaaaaccatctataggcaatagacaaatgaatgaatgtggctgtgtttcaatcaaactaaatttgcagaaacatgcagtggtcccaggccatagtttgctgatccctgctctcaacaatcctttaaggtgtggtatctggatcctagcatatgctgtttctgtttcatgaaacattcctccttcatctctctgcctagctagattttagtaattcttcagctattagcagaggttattttttgagggcagatgcctcactgatgccccaaatctgatggtatgccacttcctctccagagtactgactgatttctggttgtctggagacttgctctctgcacttcagagtatgagcttcctaagggtagaaatctgcttccctttctgcctgctgaatccctggcacctaacacacaatgcctgggacatagaagtgactaaatacatatttgtttaatgcttaacaaatgaaattacttacatcttccttactttgttaggatcataattctagcaggtgaaattatttatggtcttatagtttatgagccatgtcaccatgttatcacattgtaacaaagcaaaggtttaactatatctcggctccagtggcattcagagggctgtggaaatcaatagttttagcttcatttagctaagtggagaatgccatttgggcagtctgtgtctactaacaacttggtccacacccactgctctgctgtctcgaggtggagaataacacctctctgtccccatcagtgtcttccactctttttagaagtactgccagcacaatgctgtctatgctccaatgcttaacaaaatttttagtgaaatgttgcttacctttttgatatatcttattatcatcctagagcccagagaagtgcattagattaacatggaatcagaatccgatgtaaccagaataacttccctccaccaagactaatgctttgttactgggtctaaaatgttgggctcagttcttgggaagacttacttcccaggaagctcctctgtgtctcttaggctcacacttcaaggaggctgctcattaatttttcaacatgctcaggtatcactgtgaatcctggccagagcaagctggtaccttgactactcttttttcctcttccacttgcaggtagaacaacaactaataacaaatgtatatatgtagctcactatgtgccaggtattcaccatctgtaagtgatttaccagtagtaacttaattgaaccttgtggtgattctattgcattatctttatttcaccaaggaagaagctgaggcacagagatgttagttacattgcctaaagtcacacagctagtaatgatggagctaggaatataactcagacactctggttctgagtaaatgccctaaacccatgctgctggtgctgtgatagctgagtctcagcctcttcctttctcctacccctaaagaatatacagtcttcattctacccacttctctctcagaatctcagaaactaggaaaaaaggaggggtagaaaacacataacagtgcataacttatggtacagactgagacttgaggggaaatattcagagaccactttagatattaggcaatgctagctctataataagtagaaaattccaaattcaagatattctgagccttgaaaatcatgagggaaataaaaatgcccttgaatggctatgctgctttctctattcaaagagctagcttggaacactaaaaggatgttcttattcactaagtgtttttcactgtttgagtctgcagtggagttttagccacaaataaatgtttttcctaaaattgaaatcaatttgtaaaataatgtagaaaatataaagcctcttgctgtttttctcagtgataaagcagcaggaccgcagcaggaaccaaccatgaaaaatgtggccacctcgttgagctttgcactaggaagctacttcattttcacatacaaggattctccctattccgtgttgcaaataaaaattagtaaattagtagtactaagtttaatgaactctactgaactctgtgtgatacaggaactgacaactatgggtctgaagatattacatccctgttgctttgtgaaaattatctttactccagacttgatagaattagcgtaaacagataactcatccatctttcaatttaaagaccttccttttcctcccatctttttccttttcatcttcaatggttaattctcatttgaaaggatcattcccttcatagacatatccccggactaaaacatgctctttctaacctaaagaaatggtttcttcataaactcataggcattaacatatttttgtaaggtcaccaagagtgacttgttcggggtacctgaaagtcaatatggcgataaactgaagaatcagatttttcttcctgatttttctaagattattgtgggtaagatgaaccatcactttttgggccctagaaactgatttatatagagactagaaaatgttttacatagagaaactaatttatatgcagattagaaaatgtttttggagtttattttcccactagtaaagccaatttttttctgtgtaatgaatccattcacctacccatctacccatcagtctacccattcacatgtccatccatccatccattcatccatccatccatccacccacccagtccaatctataattctaaccatcttgaccctttttatattgcttctctgcttcatttttatctttgcccttgtcatcttttactatttgacacaagttttttatttcatttattgtctgcctcacactttagaatgtaaattccattaagtcagaaattccagtccattttgttcatggtgtatccccagcacctagaacaatacttgacaataaatgataataaatgtgagaaatgttgcaagaatttttattaaatatttatttagcatttactacttttaaagcactggattgagtgccaaaaaggatctaagatgaagcagatatgggtctcactgtcaaggaattccaggccaagaaagctatcaccaaaatatattattttaatggcatcattatatagggggcaaagttgttttcatgagaaaaatgaagcatatgtggtatttatactgtgcctgagtgaaaggcttccccaaggaagtgacacatgacattgaataaggggaagtatttgaaaaccgagagttgtagtggaagggcatcctagaaaaaagtgacaactggaattaacaagtggaagtggaaaatgcaggatatgttggagacagaaaagcaattggttcagtttagaggaagcctagaggccagaaagatactaatggagaagatctatttggaaagagtggttgggtcagattatggaggattttgatgtcacctgttggcagtagcgagtccgagattctctcgtatctgaacctctctgtctcccctatattataacttttgaatgacaatattttatgcttcctattctggtttccaaagcagcaatgtggccatcccagtttgctagagcctggaaggattcttgtatgaaatgcaaatttagtctttgatctacattttgtaggtcaacaacctcagtttcgtggtggtaattacagggctcacaaggatgttgttcttgagtaatgaatctaatatattagtcacaaacagtaagcatctcacttcccctactcctccttttggttaaggagcacaaattgtccccagttctttgagatttcttccgggttcatctggagcatggatttctacctttgcaaacatttaacttgcagccctagagctgtgtaataacagatagtattttctactcctagccttatctggggagaacacacacaaaaaagtgttttttattttggcatgtgagactatcgagtgtgtccttgttccataagtgtactttggcaccaggaagcagagacagcagctttcaagtgatgggagaaacagactgattaagagctctgcctgggcagacggtactgaaactgggtgtgtagtccttgcctcatcatttcagtttttttaatgtaaatttttatttttgattgaaaaataataatgtatgtatttatggggtacaatgtaatgttttattatacacagacatgcacacacacgcgcacacacacacattgtattgcagtattattcacaatcgccaaaacagtttgggggttttcatgaaaaaaattccaattttgggtctgttagtatattttatcatttcccccattctcaattctttttcctctaaattcctttccctctcagttaatgccaccactgtcctatctttccatatacccagaattaaaacttcagtgtcaatgggaaaaactggtcataacatcatctattttaattaaatttaaataatttatttacttaaaaaatcaagatgaaaatacctaatttaaattaccactgaaggctagcattcatttccatggcatggccatttatttgttctttgacttcatcttctcctattattttcactcctatccattgaataaattctgaaatgggaatagtatcaaatgggagtgttacttccacactttgctgggtggagcaaacctatctcctcacaaaagggatagaagtcagtttgcagtgacttccctgatcctaccagccagacatgctccttgcctctcttcttgcctcctcctttaatatttaaaatattttttttaattttatttatttatttactttttgtagagatagggtcttgctatgttggccaggctggtctctaagtcctgggctcaagtgatcctcctgcttcaacctcccaaagtgctgggattataggcgtgagccacggtgcctggcttctgcctttttgtgataacagatggtaacaggaatgacaccacacttatttgtaccactgtcatggctctaatgattatggctttgaagtagcatcatttgtttaaagagctcaggttggtggcccagcaaactcgggttcaaattatgcctctagtgctgacttaatgacatggggcatgtcgcttgaccttgctgggcctgttttctcatctgtaagatggagattacaaaaactttcaaggtccttgtgggaagtaaacaagttaatatatgtaaggcacatgcacatagcctgggacctggtaaataggtgccaagggtagttattactgtggttgttattgttagagtttttgttttacttgtgctaaaaatagaagattcccaaggacagaagcttcgtcttctacaccttgaagggtagtgtttttaataagcaaaggtgagtgtgtgaggtgtcaggtatgagcactgagctgtggaggctttcttgatcttttgctttgtattttaatagatttcttcttccagtatcctgcctcctggtaatgagaaaggggataaggtaacttacacataaatttggttcaggtacatcattttttgtccctagatcatagatatctatttgcaaggatgcaatctgtgatagctaaatgtttgctttgttttataaaatcaagctaagagaaataaatgttaggtttcacataaaaaaagtccttttcagaaagagggtgctgtaagtatttccattctctcaaagcattctagagacagaaaaagtgttttctaaccccttcccacccccaccattcttttcttttggtgcctggtgaagagtacattaaaataggaaggaacattccagagtgctcaattgcctctgttcagggtccacagctgaatttctaagttctttctcctgtggtttatgcagcctatactttgactacttctagttagacagaaggaaagctcacacattttgcagtgagccaaggtaaaagagaactcttttgtcaaagtaataataacacttagcacttatatagggctttttatcttcaaaaggccttgcaaacattagctaattaagaagtctgctcaatgtgcagcagctgttgaaaaaataaatgtgatgcttgggtgtattaaaaagaagaacgaaaacatgaggacatcctatatcaagcagctgttgtactccgtctaatttgtttgcttcacctggtggaatacatcagacgctaaaatagtcctgccccatagagtaataatggttagggatgaggcagagcttgtacataatggaatattgcaagggctactggatatttaccggaagaggaaaaaccaaagaaaagctgcatcgcctaatttttattacacttttataatcatgggctcatgcagcactaatgaaacagacatctgacatgtctaatgacatgaacatatcgtagattctttaagaagaacctatttgcaagagcaagcattctcatttattcattcaaatttactaccaaatatgtattgagtacttaccagacactggagacatgcatttataaattacttggggacagttttgaaacagctgtggctctatcatcttacatgttatttacctattgtaccttaattttacattaatattgacacacatccacccagacccatattaaattcaatcaacatttttattcgttgattctttggcagaaatgagctaatacaccattgcaagagctgagctattattttggtgatgaaaacaaaatttagaaataaccaaaaaatgttttttttgtggttttctgcaatgggcatttggatatggtcctcttttctttttcttggtttttataacaacagtcattgagctatacctgctgttctgttttaaatacctgtttcaagaggttgcaaattccaaaaccttgcaaatttcaagaggttccaaattccaaaggaggtggtacatgaagagaaaagggacagagatcatataatgtcaaaatgtaagtgcctgcatcccattagagtataccccatgttatttatcaaagtttacacacatgcaaggcgtattagaataccttacttccattgtacagaaggagatgggggaattatactttggattgagttgattgttaaaatggggttgtaagaaaaattatttcctcattcaaggaggacaaattataaaagagatagcaaggaagtgaataaagaagagaaggtgttctaggtattgggaaaaaattgaaacagaaaatgttcctagacaggagaaaaatgtctgaaggaattagaaataggtttatttttgctaaggaaaagttacaagccaccaaataaagtaaagtagcaaggagaagccaagtcatgcaaagccaaggccatagttacaaagataaaaaagcatctacttgtcatttcccaagttcagaggatggaacagcgtgaagtgactagaagcccaggaccaacggttgattttcaaaggtaaatggttggggaggggttgactcggttagaaaaaaagtcaatttcagtgatcacaggctcatcctggagcattgcttacagtaggaaatatttggaaataaatcaaatgtctattttttgttcgatcatatttttctgagaagaaaggattgattaaataaatgaggatttattcataaaatggaatactatgcagctattaaaacaaggaagctctgtcactactcaaagctcaaatataagttgataaagcaaggtaggggaaagtgtgcatagtgttaaaacttgtgtgaaaaatatagatccaaatgtgtgagtgcattcatgcatatttatatatgaagagactatagactaactctggaaggacatgtatgaaaatactacagtggttacccctagtgaagggaatggagaaattggaagactaggtagatgctagactcttactttttagtgtatatttcctccttctcccctaaacctttttttttttaaaaaaaagaaaacattttattatgagataattatagattcacatgcagttgtaagaaataatacaaagagatcccatatatctttcatccagttttctccaatgataacatcttatgtgaggagtttaatgtcacaattagaaagttgacattaatataatccactgaccttattcatatttcaccaattttacatgcctttgtgtatttgcatgtgtgtgcatgtttaatgctatataattttatcacatgtgtaagttagtgtaaccaataccacagtcaagatacagaacagttctatcacaaggatatctcatgctacccctttatggccacagacagctccctccttctctcccctccttactcctggcaaccactaatctgttctccaaagccataattttgccattttaagaacgttgtataaatggaatcatgtagtatgtaaccttttgagataggatttttatattcagcataattcccttgagagttatccaagttgttgggtgtatcaattcttatgaagggcatgttgttggattgttgtttttatccactctgcactccacaaatctgatttttaattagtgtatttagaccatttatatgtgaagtaattattgatatgctagggcttaaatttgccatttaattgtttgttttctgttcgtttccaccatttctcatgtttctgtttgtcttttcttatcttcctccgggttacttgaacattttttggatttcatgtttatatatttacagtgattttgagtctatcattttgaatagttctcttagtggttactctaggtattataatatacatatataaagtagtaatatctatgtgaattatattccttttttaccttttgggctactttgtcttacctacaagttaaatttaaaaataaataaaactagcaaaccaaaacactcctacatgtatacctacttaaaacaaataaaactcacctctgtacagaaagattgtagacaagaaaagaagtgaaaaccaaagcacttcagaagtcatgcaaagaaatcttgaataagaagaaaggattaaaccaaaacttttagggcatgactgagaaattgaaaactgggggctgtccaggacattagaagcctggagcagagaaagccatgttattgagtatgtaagtttgttctcacattgctgtaaagaactacctgagactgggtaatttatgaagaaagaaggtttaattgactaatggttccacaggctctacaggaagcatggttgggagacctcaggaaacttacaactgtggtgggagggcaaaggggaagcaagcacatcttcacagggcagagagagagagagagagagaaggggaaagtgctacatacttccaaataaccaaatcttgtgagaactgtaccatgagaacagcaagggggaagtttgcctccaatagttaaatcagctcccaccaggtcccccctccaaccctgggaattataattcaaaatgagatttgagtggggacacagagccaaactatatcattgagtatccaggccttgtttttttatgacctactgcttaccacctggtagacctcatttcatttcttaaactctttaggtttcaaatataaaaggaagttaataatggaacctacctcgtagaattgttgtgaagattctcaacatgtatgtaaagttcttagtgtcatgtctgacacatagacaaactcaagtaattgcaatcatataactgaaccttttcttgagtgtctactggggtcgcaggggttgcaggttacaatgatatggtgccattcctcagaatgagaagatagtgccccagacatgtttatagaccctttgatacttccctcgttggatgaaaccctcttttcagtttctttccactaaggatagatttcagcatatcactatgcttgaagtaaaaagagcttactccaggcctcttggctcttgtccctaccttagactgatggccttggtatttggtatgtgaagtagcagtttggatatggagtacaaagagtgaaaaaaaggttggatatggatttttagactcttactttgggaggatgagaaaaagttctcagaattgataacattgtccctagtagtaagaaatatcatttttcctgtctttctaggcatccttgttgatagatctttggatagaattttttgcagagaatggatgatgtttactttttttatatgtaaatgattctaaaagttgcttttttaaggctgagcacggtagctcacgcctggaatcccagcactttgggaggccaaggtgggcagatcacctgaggccaggagtttgagaccagcctgaccaatatgaggaaatgccgtctctaataaatatacaaaaattagctgagcatggtggcatgcgcctgtaatcccagctactcaggaggctgagacaggagaatcgcttgaacccaggaggcagaggttgcagtgagtggagatcacaccactgcactccagcctgggcaagaagaacgaaattccttcccccccccaaaaaaaaaaattaaaaatttgctttttttagtgtttttgtacaaaggatcatcgtggtatgatggcgcttcacacatgcagaatggtcatcttaggctattgtaaccatgtagagagcaattccttagggtggtgtttttttgttgttttttatttccttcattcccaacttttatggtgtagagctctggctccatttcaaatcagcggaaaaattatcatcagacctaagaatgttttcttttgagatggcgtctcactctgtcgcccaggctggagtgcagtggcgcgatcttggctcactgcaacctctgccgcccgagcggcaagtgattctcctgcctcagcctcccaagtagctgggactacaggtgcctgccaccacggccggctaattttttgtatttttgtaaagatggggcttcaccgtgttagccaggatggtctccatctcctgacctcgtgatccacctgcctcggcctcccaaagtgctgggattacaggcgtgagccaccgggctcggccaagaatgttttatatttcctagtttctcttccttttgtggatcctaatcttttgtttaacaattgatttctacttcattttgactatatattttcttttcaagcctttttctccctgcatcttgccaatatccctaaccccattcactctcggcaaactcgcctaaatctcccaccatgaattttagtcccaggttagacttttaacctcatctcccattgaacaaactgcaaaaaatattaatacaaagggcagtttagagtcaacaaaaattgagaacacttgcagctgatggtaccatctgtgcctgtcaaactctggccaagtagttttccatggtggagaaagagagaatctcatgacggcttttggtttggggttattgagaactgagcctgcactggaggaagactagaagagctgggaggcagctctttctctttgtggtgtgtggctcatctcccagaaaaacaggcctctcccagaaagtggtcaaatttggcatctgagacctgagagtggcctcctgtgggtcctttctctcctagcccatctgcgaaaatcaatctgtgccaggtgctccacatggcagaggggagtggtggagtcatgaaaaagaattaagcaaacaaacaaacaagcctcacagagcacacaagaaatttctgaagagaagtttcccaggcttttgatgaggcgaaacaggaggaccatagagcagcagaggaagaggaagggggaggatatggaggttacctgatggcctaattggttccgacaatgcactcctttgttgcagagaatctgaatcatggaagaagcaaataaataaagaaaaacatatggcagctaagtcatatcaatctacattaagaaaaataaatgagaggatattagggagaagatcctgagaggagaaaggcagatggggactcttagaaagtattcttaaaatgggcaggaaatgtgaaaagggactttaaaaagaggattgtgggatgagcaatgaataagtaaaagggtacttaacctcatcactcatcagggtagtgcaaattaaaaccacaatgagataaaaatactaccagaataactaaacaaaaaatgatggatcaaaccaagtgttggccaggatatgcaggaattgaactgtatgacagtgccggtgtgagtgtaattagtgcaacccctgtggtaaactatttattgctattgttagaattgaacatatgcatatcctacatcatggcaatgctatttctaggtgtatacccaggcacaatgagaacatatgaccactgagcatcatgtacataaatgtttatagcagctttattcacaatagccatatttgaaaataataaaaatgtccaccaacagtagaatagataaatatattgtatatgtcatggaacactatgtagcctgaaatgaatgaaatgagaaagaatgaaatgtggatgcgtctcacaaagataataacagaaaaaaatcagatgacctggatgacaaagaagcatagtgtttggggtgttacatgtatttagcacattatggagaaaatagagtgataacttgagttctagtgagctccaaagggatggaatgatatgtaaaaatcaccagaaatttgtttaagccatactgaacctttctataatgagacctaaatagaataaggtactgggtaatgaatgtttcccaaattatggcatgaatgtttaaggactatttcattttaagagatgcagtgtccagaaattgtcaccatggtagtagtttttaaaatgtgttcctcagagctgattggctccaggagtgtgtaactcaggagtgtcatctaccatctgtttatctatctagttaactatctattgtagagacggttgtggtggagtaaaccaaacaggcagcttgggattcatttgttggggatctgcacaagatattgttagaaaatagtttgggctgctaaaaaaaaaaaaaaaaaagaaaaaaaaaagaccacttctttagagaactgttagtgtgatgataagagattatagggcaccaggaaaatctagcaaatacagccatctaaccaaaaggcagtattaccatccttgctttgccaggggcaagtgttgatatagacaacatttggaatttggagtctggagtgaggactcctcggaatatgacacttaaagaagcccctgataaaatctagctaataggtagcaataataatattagtaaacatttattgaatatttactattatttagtgatgtctgctatttttatacatcatttaatcttcacaagagcacagaccttgtagtcatgaagtagctgctctcaggctcaccctcccaccaagaagctgaataaattactgtttgtaggaatcagagtacaccaaaatgggctagcatttgaaagatcaagaattctcaaagaaggaaatgcattgaggtgaatgggacctctgtgggttgtttcctgtgatgcatatgcaatacttagaagaggcatagtagcctagatcttacaggaattgcagtgggactggtagatgaaaattcatgttcagggataataagacagccacaatatgagggaccaagattctggagagaaggaaccacagagatctgagccagaattctgcacgtgactttccctgaggaatttgcagatttctacaccacactagcagtgagatactgagaagccaagaagaatgcagtagtttaaaaggccaaaaatctaagcagaaatgtaagcaatcccagagaactgaagagacagaaattgtagttcagagcctcccaagcaagaaggatctttataaacatggcagattctcaattgagaatctgaagagctagattctaatagtatgggcaaactgaacatagaccattctctagtggatcaagataacctgtgtatgttctgtcttccagaaaaaagtggaatcctctatgtaggatttcagggtctaaataattattttacttaccatgtatgataggcaatagaacattaccaggcatgtcaggaaatatagccaaataaatgaatttcttagtgaaaacaaataaactgtaggttattgatatattgggattatcagacagatttcaatacaactatgattaatatgtgtaagaaaatagatatcagattgattatttcacaactggaatctgtagacaagaatacaggggaaattctagaagtgaaaaacttaagaatctaagagatatgtttaatagcagattatgcatagtagaagagttgattagtaaagctgaaaatgtttataaaaataacggatcaaagcatcaagattaaaaaggtgaaagataaagaaaagagcatagcagacacccagtgaaaaatggtgcttctcaaagtatggtcctgagaccacttctggtgctggtccctgacaacatagagtgttcataaatgtttatagcaattgattttgccacaacattttaatagcatattttatgacaaaattagactctaagggattataaataaaaaggaaaaatattaatcacgactagtttcagaaacattggtataacataagtatgttggagtcccagaaatggggaagagaaagaataaggcagaagtaacatttgaatctctattggctaagaatctttcaaaactgataaagcctcaacacacaacttcaaaaggcttcatggaccctaagcagcataactacaaataaaaacttacctaggtacgttagaacgaaactgctgaaaacctaagaagaagaaaagaaaatcttaaagtctgtcagaaaacaaaacaaaaaaaaccaatcttcaaaggaactgtagttcctgaagctgctgccttttcaatggaaatggtctagaatccagaagtcgatgaagtggcatcttcaaagtactgaaaggaagtaaccaccaacttaattctatatcaagtgaaaatatctttcaaaataaaaataaaatatttgtggataaacaaaagcaggtaatttgtaaacagcaaacccacattaaaatattatttatctatttatttattttttttaaagttgtagagacagagtcttgttctgtcacccagtctagagtgcagtggtatgaccaaagctcactgcagccttgaattcctggactcaggcgatccttctacttcagactcctaagtagctaggattactgttgcatgccactatgcctggctaattaatttttttttttttttttgtagaggcagggtctctctatattgcccaggctggtcttgacgggctcaaacaatcctctgacctcagcctcccaaagtgctgagatttaccggcattagtcactgcaattggcccccacactaaaatattgaaagaagctgctcaggcaaaagaacatgatcccagatggaagtacagaaatgaaagaagcaatgaagagtaagagaaaggtttaatataaaggagcatatagataaatgttgtgcaaaacaagtaataatgtctagtaagattaaaatactatgcattaatagccaaaaatgcaggagcagggtaaactattaaaatgttgtaaggctcttgcaatgtttcagaacttatgaaggcatacattatattatattctagtaagccaagaattaataatgcaattttaggatgattactaaaaagaataacaaaagaatttagatgtaacaaactaagagataataaatgggaaattttcttaagtacttgataaattttttaaaagccaggagaaaaatataggaccaaagaacaaatgaaatagagaacaactgtgaatgtgttagatttaaattcaaatatgtctgtatttacattaaatataaatggcctaaacattctcattaaatgacatattgcttaactatgtaaaaaataattttaggctacataaagagacatactcttaaatatcaggcacagaaaggttaaaaataaaataatggaaaaagatatactgtgcaaacaccaatgataaagaagctaatacagctgtactgatattaggcattatagattttaaggaaggaaatcatgttaaaaataaaagatgccatgacatagtgacaaaatgggcaatttgacaggaatatttaatgatccgaaaagatatgcatttagtagcacaaaatatttaaagcaaaaactaacgaaactaagaagagaagtagataatctgacaatcatagttggtggttttaatacccttttccttctttaactatcagcattagccaacaaaactatgagtgaagatttagtagatttgaataacacaattaacaaacttgatctaaatgacatatagaactctacatccaaaagctacagaatgcatttttttcaagtaaacataacacctttaaccaaattaatcacatactggtcaataatgcaagtctttaaaaaattcaatgagttgaaatcacacagaatatttcctctgatcagagtggaaataagccataaattaataacaaaaagataatgagaacatacacttaatgctgtgacccagtaattccattcctagatacctcacattcatgggtacatttggcatgaaaggaagtatacaatcatgttcatgcaaatcaaaaataaccctgtgctcattaacagtggaatgaaaaaattatatgtcaaaatgatacatcatatattcatataatgaaatagtgaatgagctagtggtatgcacagcatgcatgaatcttgcagatacaatggtaagcaaacaaagccagatgcagagaatgcataccataatatttcatttatataagccaaaacaggtaaaattaagcgatagtgatacaagttggaatagtgttctgttttccttgtgtacttgttatacttcattaacacatgtttaaaaaaaacccaaaaatatcgcaagataaaaaatgcagaagcattttctgggtaaagaaagatgggcaaacattacaaacagaaggaaatttggggggttcaaattctgtatcagtcatgagacttctttcctccaaaaaacttacttttgaacttttaaannnnnnnnnnnnnnnnnnnncttttaaactctattaacattcttatctattatttattatggaactagatataaccacttatagtaattgtctcaaatctgatttctttccatctatattacatgtagggtagtacgatgtagtggttaaggacacaactctagagagagactgaggttaaatcccagttcaaacatttgggcaagtcacttaaactctctgcatctcagtttcttcactgtaatgtagaggtaatagcaatatctatgtcagagtgctgttttgagaattaaaagaatcaatataattagttacaacagtatctggcacaaaagtaagcactccataaatatgtgtgattgctactataattaccttggaggatcggatcattccttatatttgttttaaatccctcgaatacctagaactatacaagcaatcaggaagatgggctttctggacagcgagaagggaagatattttggaaactgactctgttttctctctgtgggtgaggatgagcttacattgatgacaagtttggcttatgaactaggaccttaagtagagctgcataaattagtgtaagtgttattaataagatgggaagaatttgctttctcagttctggcaggaatttatgaccctgagagtcactttatgaccctgagtttgccataatcagcttagtgttctgataggaaaccaaatggtaaatgccaagacgctggggcattggtctcttgtctgcatagtcaccttactttcactaggatctttattcatgttctttatttaagttgggaacttctagcaaggttatgtgtgtgtcatctacagatatgtaagcaacctggactctgaaagcctatatattaaaaaaaaaaagtttatggattgaattgaattgaatcatactgacttgaactggagtgaatcttgagagatggctaagaaccaggaaggcttagtggcttaacttgtaaggctatgagtttgattcactagatatgtaaattttcacaagacacttaacttttcaggcccttagcttactcctttgtaatttgtggctaataatcataggaaccccacagggttgttgtaagaactaaatgaaaaatgtgcctggtacatgtattaagcattcagtaaattatagcaattgctattattgcggttgctatttttatttctcagccaagaggctcaagccagggtgaactgaattgtgaagctgcaagcttttcaaatgtgctccttccttattttaaaatcctttttgtttttattctcctgacaaccctgagagcttggacagggtaggggctattatctacaggtggcatttgagataataacatagagagataaagtgatttgcctaatgatctcataactgtgggtgttagagttaaacctagaccccaacattccctagagccagccttgagatttttattaattcctgctctatctacctgcttatctcctgataaccagcaagagatttttcttcatctctgtgtagaagatttctgaaagaggagtattatccaaattaccagcaaaagaaaatcttatcttttcagatatgatagatggctgacatagatcagtagaggtttttaggagttctaagaagttaaacatggaagttttattttagggcctggcatcctcacttacccatactgggactcattttacccttaacctctctccagcatggtatttcatcttactgcattcttcttgctttatagtgggctttttccagttctctgcctaacttaatgaagaagattatctcaaagttcccaagattgttacttctcatttcaagctaccaggagagactcagcaataaatttttatattggggattcagtttccttgagaaatctttaagtcaataaccaaaccctttaaatttccttaacaatggtgactgtagggctgtgggaggtgttcttttaccttccctctcggcactaaatgtaagctccctgaggacagggactttgtctatcttcctgcaaaattcctcaggggacagtacagtgcctggcacatagtaagtgctccttacatatttgccaaatgaagggatgatgtcccaactccaaaatttgttatattttaattaatttcatatctttgttatcttttgctatatggatagatttttagcttagattctgtttagatgctttttggtttgattctggtttgggcagcttgagaaggctgtagaattttttcgtgttctagttagattttaaatttcctagctcctcagtagagttttctgcctctcccttggcccaagtatttaagtccccaaatttacttgcttttgaagactggattttgaatgtaaataaatgaaaaataattattttgtcttaataataataattaaattatagcactaagtaatttaggaaattttagatataggtagggtattctgttgactgaggtcataggatattcttaaaattggttttttgatctgagatacagcattctattcttgccaggtcatataaaatagaatttgctactattacttgtatttgatttcccctgataggctattcagctaggccagccttctatgactgaaaaaaaatctttaacaaacaaagctgacaaaacaaagtagtaaactagcctgctttgggtttcaaggtgagtctccggtggactctggagcagaaatcctaagtttcttctgactccttggcctgtctgatgccataagagggtgcagggggagatttgctctgcttctcttctgtgtcaaggcagactgagaagcttttaatccactatatttcaaacagttgcaagtaaaaaaaaaaatgtcatgggaatacccagatgtgggcagataataaccctactttttactcccacttattaatccataagaaggaagggggtgagaaatagtctttggacggtcagctatccatgtacagtagttggatgctgagcccttttcaaatgtactcagaataaaagtgaaaccctactacttgttttgcccattagatagcattatctccatggaacgccaattcatatctctttgtgctgtgtgtggttctcacatatgggattttaataacctccatgctgtgctatgaatttataagcagagctgatagaggaaaagcaccacaggactttattttttcattattactcttttgaaaaacagggtctgcctcatttctgtaaggttctcacagtactggcaatgttgcagccagaggtatagttgttactatggaaaggactaagctctttatttatttgctatctatttttttccagactccctttcccactgctgtcctgcctttagccacctccgtaatatccactggcattgtacttgaagcttcagtgaactgattgcaaggaaataggctccatttgttctctagctctgtggtttatcttacattctgaatgttttttctgcccatccttttaaatgtggtcacatttctcctctgtataattctgcaggtccaagtatcttatttagtgcagtggctaagacaacaggctctgtagtcaactagtcatggatgtgcatgctgacattgctctctgatccttgagaaattatttgagttttgtaaattcatctatatgatggtaatgataaaccttcctcctaaggttggtgtggttgttagttggtatggtgtggttgttagttggtatatttctttttttttttttttttttttttttttgagacagagtccccctcagtaacctaggctggagtgcaatgatcttggctcactgcaacctgcattctgtaaaagggactaaaggggaggatttaccctaagcttgattgagtgttcaggaaaatacttctttgagaagctgagctctgggctaggtcctgcatgatgaaaaggtatctgcaaaatgggaggatgagcagaagacaaagaatttcaggaaaaagacagaatagtctcagtcctgaggctgagacaagaacatggcatggttgagaaatgtaaagaaattaagtgtggaggctgaccatgactgagatggccagagtccagggcacctggagccacatgaagagttttgaagtttattcaacatggaacagaagccttgttgatttgggggttaacacaagtagtgaagcagtttcctccaggtttcttctaccaaggaatgccagagagcagtgtcttgctttgtgtgagtagtgttttgattcattacttttatgggttgatatgtcttgtgagaatatgagatgtggattccagagcttaaaatctgcacgtttagtttgaatgctaattaccacaaatatgtttttaattgataactgtgtttcgacatacttcattacgtttgacctttaagatcatttttaactcatcctctttaaaaaagttctctttgaagaaaatataacacacatcaatggcattttaattgtttacctttggaatatttttgtgttggacacaatttatccatcaaataaaaagtgaaaaaagtcatattttgagaaaataacacaaaatagggccaagtgccaaacatcctaatatatttgttttctgcatgatttattattacgccttttttggtaccatttactaagaatatgtatgacttaatttttcataatagccagcaatttaaggcagcaaagtatttgctttcttccactgatctagtaccgcctatcattgtatcatactgacctttaatccagctcttacacacaaagtcagttatctgtatacttatcgttttaatgggttttgatagatttccccatgctcatttagttatataaatgatttattatttatgttggttttatgatagtttttatgggttttgttttgttttggtgaagccattttgtagtctaacaaatatttcttaattgggtatgcatgaattttggctaagttgctccatataaataaatgttttgattacttctaccattgtctacagctgttatcatctttaacctccaagttttcttaattttcaaaaggaatttattgaatttaatctgagccagtaagacgggctttgatgttaagtaatagagattagttgcccctctctgatgtctacattactgaacagttattaactaccaaactcctgtgacacagtatccttcaaattccaaaacttagctacagtttaccttactaaaatctctgctactggtaatcagccttttagccagtgcagcatatattcagcttttgccagaagatggtttgctcccaagggcttttggctccaaagactaagtgttacttggtggctttggcaggattcagaggagcctggctgctgggaactgacatgctcagagcttgccagccccaaaccattgtgtacctcacagctctcagtgccaggagtttgtgtgccaagaaaacagaaacctgtctagaaaataaactgttttctcttgcacatgtcctctaggaagacaagaagaggttgaacctgtaaattgttttgtggttagaaaatgttttaggtttttacatgggaaatataatgctataacttcatatgtaaaacaaaatggcacattatttatgctcctcaaatcattttacctccaattattaaaatgcttatatatatatatgtatttttttttttgagatggagtctcgcactgtcgcccaggctagagtgcagtggcacgatcttggctcactgcacgctccacctcccaggatcacgccattctcctgcctcagcctcccgagtagctgggactacgggcgcccaccaccacgcaaggctaatgtttttgtatttttagtagagatggagtttcaccgtgttagccaggatggtctcgatctcatgacctcgtgatccgcccatcttggcctcccaaagtgctaggattacaggcttgagccacctcgactggcccaaaatgcttattaatcttttaagtgatcaatatagttgttattatgatgacagtcatttcagctcttgcactgaggcagttcctgtgtgtgaaaagcttctaatgtgagtgtgtgctgtggatgtatggagatcaccccagttgggtggttgtacatgaatgaatgtgggttatgtgggcaggtaatgctggagaagtcagtggaaggtgaattaaccagctaacaaaacatttggataattgaatgttctttagaaacaaatcgtaagccattaggaaagaccttccttccttccttccttccttccttccttccttccttccttcctcccacttccctttcaccttccccttccccttcccttcccttcccttccttttcttttcctatagcacataacattggaattgactctactcactttcatccaactatccctacctcttcttcctacttaccctagatttttatttctatttctctaccagttcatattttcctccatctagttttcatcagagaaaattttctgcttcatcaaacacaaaactgagatataaatgtgggagcatatgaaattagagcttgacctacatttagtacaattagtattattctaaggaagtagacagttgtggaaaaatgaaacttggaacacagaaaaggttaaattcatggcgcttatgtagcttattttcattaggcctgttacctaattacttattagaatttctttctatcttttagaccttagtttctcaaccttagcactattgacattttgagtaggataatgcttcgttgtgggtagggggctgtgctgttctttgcaggatctttagcagcttcttggcttccattcactagatgacggtagtatcccccaattgtaacaattgaaaaatgtctccagacattgccaaatgttccctaggggacaaaattgctccctggtgagagctgcttttttttagatccaggtgcttagacaaatgatgatataaatcagtacattaagtagagaaatttttttaaaaatcagtttctaaagactagatttctcaacaacttatcacattatttccaacaacattcaaattcaaaagctgatgcccaatgctagcaaagtatgaatagatagaaagtaaacatcttcctttgcattagataagatgcccagcaatggaaatccctggatttaaagaccttgttaagatgtattatgtcagatgaaaagtgctattttaataactcattgttattcttagcatggatcttttattttagaaaaatggataattagcattttggcttatcactttcccttaatgaatacaaataatttgatagacagacaaccaagagagacttcattaaataatgggattaatcagcctgggactggagtaaattagaggttagacttccagcctgagagatggaattcagggtttggtggcaatgtcatccaattcatgaaggatatttttcttgattgacctaatgttgcagtaaaaaaccagagcaagggtcaactggccaaaaataaaagtcaaaactcagcttgggaagttataggctacactgcatttaacttgcaactggataattgcaagaacacattcaaagcgtcactgcaaagcccttgttgtttagccctagctgcttcaatttctagataatggcccattattaatgtggaagtattagaaagttttccagggaaaaatatcaacctggaaccattcccctttgcatgcattatacacttcactgccatctggttatccataatatccccaaacccctaccaattttccaaaaagaactacaaataacgctttgtatttttagaacagtcttcctaacacccagagaggaaatctattgtgaagttaattttctttttcaaatgttttaaagtaaactattctttatttctaagaaacaaaacccaatgctatgtttaagcagtgatttggaactgtcttactgtcactcagagaagacaggttagtggaatctttaaggccgtggctgtcttttgaagcttatagtgtagtctttagaaagtcttcagaaaagatcatgattcttatggaaggttatttctgcggggcagtgggagaacttagatctgagaaatcattctcatcatgagttagaggaatgattttattcacaattcatactcttcattcattatccaacctacatagaagccttagttctgtgtatccttaagctgcatttgacattttacctcctgatatttttctaagtagcatttttctaccaacagactcaggtgaaaaagaaatgaaggtatcaagtatatgatgtgtacacatttagctttattactagcatcttctaagaaaaatagcaaagagctaaaacgaaaacagaatgattctataagtcctgaagggaatccttctgtgatacaatacaagcaatagaaaggccttatttctccctataaaatgtgtgtaattgtgcttttccttatttaatcacatgatttgtctttaataaacctctactggctcccaagaagtgtggatcctggtaacaagagagtctttagtgcgctgaaggagtgatggttgtgaggatacaagagtggagaaatgagaagagataaactactatactttactaagaattggagagaaacaaagagtctagggtatgtggtttggaagaaataaagattcaagaggggagggtcttcttccatatccatagagcatcttaaacaaagtttatattgtccactgatgctctgtggggtggctttccttttgtggagtatgagtagcagtgttgaattttacctcaagttactatgggatagatagggaggctgctcttggataagtaataaatgcgttgcagaagttaagaaacagattccagaagtagagaaatctatgcagaagcatatagctagaaagtagcagagtggtaattgaacacaaatctgatgacagagccaatgcttccttttattctagcatgctgctagaaactggttcttttataatagtcttaaaataccttaagtctttgagatgagatgaaagtgaaatatgatgaaatgttgaagattgtaattgaaattatacaattacatatctctttcatattaaactttcaaagtcctggtactaatagcttgtattttaaattatgtcttcattgtttaatccatattgaaaatttggcttatgcaaaattatatgcctttgacaccaaaaagatatagaaaagatatggccactatatgataaatttcttatcctctctaataagaaataaatatttagtcccaggttttgaggtgttatctatactttttcaagcctaaaactttacacttgaaaattagtgataaatagttattataggtaataggtatgtattgacaagcacttgtttgtttagatatgatactaaatggttatttatttatttttatggtcaggtttctcaataatatatccattcataattcattggcttattaaataggctctatatttcagatatatggctacagataggagccctggtgtgaggcagaggggggctgtgataatgacctttgtttcagcagtgactcaaggacaagattccaaggctcagaattttgcttttattttctctgtatgagtgtttttgtctgtcagtaaacctgttttgtgaaatgaaacaaaaaaaggtttgtttacattttggattgcctttgcattagcattttatggcaattggtctggtttgacttaaagtcctcttttttcatctttaaagtgtgaggttgctacaatattaagtgcttaagatatgccactactgctctatcaaaattatccatgcaggtcataaattcgagttccaaaaaatgtaaaggaggtcatccttttgggcctccttcatgaggccccagcataccagacctaaccagaaatggagtcttctcatgctaagtgccatgtaatcaaactgaacttagaaactagccagtttcgaaaacaggagtttcacagcaccaaatccaaaggtgccctgtcaacctgagctcttatacactgttggtagaaatgcaaattagtatagtcattatggaaagagtatggagatttcttcaaaaactatacatagaactgccatatgatccagcaatcctactactgggtagttctcaaaaagaaagcaaatcagtatatcaaaaggatacctgcctcctatgtttattgcaccacaatgcacaatagcaatgacatggattcaatctaagtgtcatcagtggctgaatggataaagaaaacgttacacacacacacagacacacacgcacacacacacacgcacacacagaggaatattattcagccttaaaaaagaatcagatcctgccatttgcagcatcatgaatggaactgggggtgattctgttaagtgaaataagccaggcatagaatgacaaatagcacatgttcctacccatatgtgggtgctaaaaagtttatgtcatggaagtagagaatagaatgatagttaccagagttttggaagggtgtggggctggggatgaagagaggctggttaatgggtacaaatacaccgttagaaggaataagttctaatgtttgatagcagagtagggtgaatatagttaaaaataaggtattgtattttgcaaaatagctagaagcgaggacatgaaatgttcccaacacatagaaatgaaaaatactcaaggtgatggataccttaaatactaacttggtcattccacattctatgcatgcaacaaaatgtcacatggatcccataactatgcacaaatattatgtattaacaaaaatacttaaaaaagaaaaaaagtcccctctgctttaaccctataaggaaagtaactttgaaatgaccaattgggccaggcatggtgactcatgcctgtagttccagcattttggaagaccaaggtgggaggattgcatgagtccaggagttcgagaccagcctgggcaacatggcaaaaccttgtctctacaaaaaatataaaaattatccaggcatggtggcatgcgcctgtagtcccagctacttgggaggctgaggtggaaggatcacttgagcccaggaggtagaggctgcagtgagtcgagatggggccactgcactcctacttgggcaacagagggagacgctgtctcaaggaaaataaataaataaatgaccaatccacttcttattccttgtttcttctttctacagccctttttttcccctataaaagcctacctctgtctgcttagctcattggagcacctttctatttagtagatgggatgttgctcagtttatgaatcgctaataaaagccaattaggtctttgaaactaaatttgttgaaatttgcttttttgatgccactattgctctttatcaaaatgatcccatagatagtctatagtcttttcttagtgttttctcccaaatctgttgggaagatactaagaaagttccgtaagtctgaaatctggtcctaaaactgtgtccagtaggtaccattgtattcaatatagcattttggtttaatcttgatcttctaaagtctgaatatgttctttagtttgtctagtttctgcagtcttgtgtactaaaagggtagtaattttcagttagctaattactatgctttacacagttataaggacgaagcattttagaatggcacttcattaaagcagtaaaaatactgtgggctcagtaatctcatttactgggtcaatagcccataatatctagaagaagatttaaagtagtttaaaaataattattcaaacgagaaagggatttcaaactataattaccatagcagtaaaggaatgaatgactccaaaggaaatataaatattatatttaaatcttaatatctgattgctgtaactcaaagggtttagctcttccaatactaaagatcacaagatcttagacctgaaataaacttcagcaagcagccagtcttggtgtagaaattaaattttttcctgaaaaaccacttgtagttaaatatccagactgacaggctttttgcagctcattcttctataagatgcttttttttttttttttttctgagatggagtttcacacttgttgcccaggctggagtgcaatggcgatctcagcccactgcaacctccgcctccttggttcaagttgttctcctgcctcagcctcccaagtaactgggattacaggcacgcaccaccaggcccagctaattgttgcattttttttttagcagagatggggtttcaccattttggccaggctgatctcaaattcctaacctcaggtgatctgcccacctcagcctcccaaagtgctgggattacaggcgtgagccaccatgcccggccaaggtgttcatttttcttagagcatttgcatatctcttactcagttttttcccatgtatttgcattttcgttgctattgcatgttagatttcttctactgtggtctgttttttgtattgttttgttttgttttgtttttgctgatgtactgttggcgattttctgtatccatgttgtagctggttaccatttttaattctcctattagttctaatagtttttctctggttgctgtgtttgcaaggagaactactgtgtcatctgtaaataatgattttttttcttctctatttcagtattaatacttcccttcaccctgcctctgggtttctgtgattacatggggtagagcttccagaacagtgtaaaataaatattagtggacattcttattttggttccagtcctagtaagaatatgtctagttaagagcttctagattatgttccaaactattattccatgagatgttaattgatttcctacaaaaaaaaagagagtcttctaaataatttccttgaactctgaattaaccaaaatgagacaaatctctttagtgaatgggcttttataacctttactatttaatatgcattgacaatctcctagagatggagaaagtatgtgactttctcccaatatatttgtcatagaacactgtttttgaagaacatttactaacatcttataaaacgatacatcagtggtatcgttctggtattgttctggtagggtactgttaattgtgatgtttggggtttttggtttcaaaatgatgttctttaccgtgttaagaaaatatcctacttttagcttacttagagtgttatataaatcaaatcttttactatatgctttactctatctggcttttgctgaatataatgttttttatatttactgatgttgtttatttgttttcaatgctggatagtagcccttacacaagtatcataaaaatttgtgtggtttgcaatttgagggagtttaaacaatgctgctctaaatgtttgtgtacatgaaaattggtacacaaaaagaatacatttttataggacatatagcaggaagtagaatttctgggtcatagagcatatatacattcaggtatacagtagaatgctacagttttcaaaagtgttaatgaaaagtttacactcccgtttgttgcctgagacttccagttgcagtgcattttttttaaacactttaacttttaattaacaaaataactcttaatttcaggtaacctggtatatatgcagtaacatctcgtttttaaaattggcattttctggattatgaatgataaggaccttttcttgtgtgtatttgccattggatttcctctttaatcaataattgcatcttatgccaattttttattgttttggctgattttattatctatatataggaatttgttacgtattttgtatattaacccttcctatgattgtgttctccctctccatagcctgcctttcacttttaatgtcttttgagggatagtataattcattttatcagtcttttcttctactgtgagtgctcttctattttgtttaataaaaatgtttcctacctgatggtatgaaaattttctcctgcactttcatcttaaagcattactctattgtatttctgatacaggttttcaattcacctagaactgaaatttgtgtataagtaagggtctagattcacctttttccaatgaggttattcagtgtttttaaaaatgtctcatttcctctgcccagtactctgtttggcactttcatcacaaacacttggggtctttattatgttgcatgggtcaatgtgtctgcccttgtgtccacaccatcttgttcctcttcatcaagggcattagctttcttggccctttgcatctctataaaaatgttaggatcagtttgtagagttccatggaagaaatcttgtggtatttggggattttgattgagattatcttgaacctatagattcatgtgaggataatttacctctttacaccattgaattttctattccatgtatatgttatgtctctccaaatatgtagatcctttttaatatttctcaataaaatggtgttattttctccacagaggtcttgcacatcatttattagacttattcctaggtatttaatattttgaggcagtaatgaatggcatcttttcttaaatttttagctatattgaaatacaacatatttggattctgatctgtatctagcaatcctaactctaataaaaactataacaaattatatatgaatttttaataccatgatataatctgtagataattatatttttgtttcttcttcaatcttcaaactttttttattttttcatgacctcagtataatattaaatagcagcggggatagtggaaattattgttttattcctcattttgaagggatagcttccaaaaatttaacattaagtattaagtacaatgtctgctatagaatttttgtttagtaaaaacattttatcagactaaggaagtcccttgttgttttccttaaataacagttttaaattattagtcaacattgaatttcctcaaatccttttgctgcatctgttgagacaatcaaatgattttacttttgagatgatcatttgattttactgttaatattgcaaattacattaatttatttttctccccaactttttttgttgtgaagaattgcaaagagttgtaagtttctgaacaccatttttacttgaaatataacagccaacagacaaactatgaatatttagattttggcatttggaagacattttctcaaaaatgaatgaagtgggcctgtctcttcaggaaaataacaatgattttttagaatataagtgagattggggaccaaaagtttgaaaacttctgtcctcttagaaagtgtaatgttacgctgggcatggtggctcactcctgaaatcccagcactttgggaggctgaggcaggcagatcacctgaggttaggagtttgagaccagcctggccaacatggtgaaacctcatctctagcacaaatacaaaaattagctgggcatggtggtgggcacctacaattccagctactcagctactcgggaggctgaggcaggagaactgcttgaacctgggaggcagaggctgcagtgagctgagatcgcaccactgcactccagcctgggtaacaagagtgaaactctgtctcaaaaaagaaaaaaaaaaaagaatggaagatacttaaaacacttctaattttatacctcctctcaagttgtatgctattttataattttcattataaaatttcctctttgtttttgtatgatgaagctttactataatgtttacatgtggatttattttacttgagagtaattgagccttttgaatcactgaattctcataaattctgaaaaattttcactgacttgcctttatccattttatctcttctctccctctgagatttcaaataaatgtatactagtccttctcattgtattctgagtctcttatcttatttttttaaatctcatgtttcattctgagtacttgcttctatcttctctttcattaattctttctttagctttatctaatttgctgttaaattcatttcttgagttctttatttcatgtattatatttatcaattatcgaatttctaagtaactattttacatatctgctccatcactttttatagttttcatttccctgcaaaatttttcactagactccaatctcattgaacatcgtaaacattgttttagtctatatcctgtaattccgtatgtggagattttatgtgagtatttttgttggttttctttaatggtggtttgtttctttttatatctgaagtttttaattgtgtatggggcattgtgcttaaaactttatttgtaacagtgatttgagacctaggatgatattatcttcctccagaggagatttttctttggttgttctaggtgtctaaagtcaatagaagttcaggaacacacaataaaattttcaaaactgaggttatcagacacaacaaattgacataaaataggttgacagattttataagactggtttattttcagttcagacttaatcttacaataactctaggaatcctagttcaaagtgaatgtttgtttacccttgggctctggattctgatttctattcttctaggcccaacatgcttccagaaacagagctcacctattccttccagaattactaatgcccctggggcaaaagcagattttagtgttagtgagctctagtcttctctaggctggtaatttcctaccatcttgttaagtcttcgatggtttagagatgaatttatatttttttttttgcagctaagttattttccatagaagggcagtctgatatttgaaagttaacattgttgaagtcaaagttctcatgatggtactttttaacaataatgaagttgaatatcttctgtactttgggttttcattttgaaactagaaggcgtacttatagtacagctttcctggagcctatcccatttgcaatcacagacctttaactcaaagtttatgcaagccacattcttctccttattcctaaaataagcctagtcttagaatgtacaatgtaaatatatctctccttgcctccaaggaatgtacataaccccactaagacagtcatgcttccctatcttttccatttactaattttgccaccatttccttccactttcagtgtggaatccagttgctagtgcccatgactatttctcaacttccaactttcagctttcagtacactacgcaccatgatctcctgactagctgctttcttcattcttgcctctgtgttccagaatattatttaggcagaatacataccttacagtagcttcatcacatatctatagtttgtaaattctagctgaaacatcatttgcaatcatttttattctcaactctcttactcaaaatattctttttcaaaagttcatcctattttaaagtctgttaactgtaactcgaagtaccctatctctcatcaattaacacttgcttccttttagaaatataagagaacctagagtgaatctagttgaagtcctttcttataaagtaacctgtttcttctctcattcttgattcattgttcctgtttccaagaaagatgtatttctgcctttccaaagggtaccaatctaactatactcttaaattattgagtcttatcttccatgtattctcactccatcagtggtccttctcttgtatcgtcaatcattccatctttaccaacctcctcctctcaaactataagcccttaaagtatccttcagcccagaaagcaaaacaaaatgaaaaaaaaaatctgtattgagtgaatggcaatgactgttccatttaccactagctttatatgctggcaggaatcccacatgaaaattaagaaaatttattaggtagtatgattttccttacctccaaagaaaattctagccagagaattgataaaacctctaatgctatataattaaaaataactctgtaggaaatagaagttctcatgcttggcactacatgcagacctccagtatactctccatttgctcttcaaaatgtctgacttctagggctgacttcatgtgtaagtgcttcttgtcaatctgttagtatttgaaggataactagaaggatttcctaccccagcatcttccctaaggattcaaatttattgttttgttttcatccctttgatcaaacattatggtctcctctcttattgtttttaattcttctaggagaatgtttctcaaacctaggcatctattggaatcacatgtgggacttaaacaaaattatgtgcaggtgccatcctcagaaattgtctgtcttatttggtcaggggtggactcccgccattgccatttttaaaagttctcctggtcattgtaatgtatagccagttgaaaactatattcctagttgagtgacatgcaagtacactaataccatatagcaagaatcagttttcttaccttctttttgtgacattcctgtgtggcattttagcagcacgtcctgagatcatcctcctgaaaggagaaaaaaataatcaagaggtaagttggccataaaattatccaagttttactgtgacctaatagtaataataggatatgaattattaccataattcacatccatatgagaaaactctttcttggtttgagaaaacgtgttttttgcctcccagtctggagaaaacatgttgcgttcctctggcacatgtacatgtttatgcagatccattccctagaggaacttccaaataaacggagcatattatatatggcaaccgagaaacatagctttatgttgcctgttgtagaattatttcatgacattaacatttttatgcacccccatattaagttttatgcttagatttaatgtcaccaggtaggaaccaaggtaaatgccacatcccaaatccacatagagtcagagctaaaccatcagttatcaaatctgtctttttatgtgctgtgagatttatacacattgctttagaaagctgcattcactggaagatgctggtttgtggaggggcaaggaagtacatttacaggttagcttggctgaactgtgttgatttctctgcagaacagtcttcacaattctttgctcacagttaaaggtctgctgaaagtgactcagtgtagatgaaaacagcttgcttaatcattcctgaaacacgggaaaaattaaaatacatttttttatcaagcaataaaaacaatgccagattgttaatgcctcttttgtacctttcacttaaaagacctcaaaaagaacatcaaggagaataaaggcaaaatctattccccaatgccgtcattatacatgttgaagcctctaaaactagaactctaaagacattcaggaagagcaggggaataaatgacagcaaactgaagagtgcgtctctggagctttgttcaacctgctttgttcaaattcattcaaattggataatgaaaagcaaagatcttttttgtttcaacattaaagtagtaaattagtgagtggtgagttgctaattgttctgtaaagtatttaaggtgccaggagtgtcccatctccaatttttaaaatggcatccttatggttgaaatgaaaggaaccattagagtagtgtaaaacaatgtttttaataatttatgctggttcaattgaaatgattttcatttagaaatactcattgaagttcttgtttttacttgagataagcaagttttattttagacttcaagatatcaaatagaaattcattttccggatggggctaaagtagaaagatagattagagctatccaatgttgtgtttcaaatctggctgtttctacttgctttgaaggtatagaattagcaggtttggttaaattttacttgaattttgggtgaccttttctaatcctgactgtttcataatttagtgtcttgaccttcgttttccatagagccaccttagtgataaatgcagagatttaataactagaaccagttgacaggtgacctttcgtacatggctgttcctttttgctgtggaaaccactgttttgcaagttttattatttcacaaattttaattatttattctattgtctataagcttattcagagagaaaaaagtaaaggttaaatattacattattcttactgattaaaatgtaaagtgcttggcacttgtcccaatatatcactcagaaaggatagggcaatttgtcaggttcatacccaaagaagagaaagggatggttttcccagggtggttggtaaggatgaaactggcctaggagagtgagcaatcacatcagctaagtgaaggtaacagatgtgtgtgtgtgtgtgtgtatttgtgtgtgtgtgtgtgtggtgtgaattttgaatggaggaacagaagggttcttttactgtatgtgtaccaatttaaagagaaaagtgaccctgagtcaacgagaggtgaaacttgccagtcagggtgaataacctgtcagttttggccatttctctctctccctctctctctcactcactttctctcttacccaggaaagaattggttaagcatatcatggtaaattgatttctggaatctatgtcaataaaatatattgtttacaaacaaggaaataaggctgagtaattataaaaatgctagagacttttagaaagagttaagaatatctacactttccccccaccctacagtatcagagaacataggaccttcacagggaatcaattcctctgtacttacattcttcagtatttttcagaacaattcatttgtatgcctctcaaatactcatgcttataataaaataaaaataaaaacaggcatggtataaaaagacccatcgtgtgaacatagtaccccagtcagccattgtcctggatcctcatagaagagaagagccattcatgagttagagacctcttgacagtcttcaatgaacattgattcccaaggacttgcaaatggccactgtgaatttctaaagtgaatttctgaaggaggcttttgggcagtggggaggtattattccctttagtcctggagaccagtttagaaaataatatcatctgccatggtcttttttgcccgacatggacagtaattatttattgcttgagaatctttcactgctgttgtgaaagaaacagtttgaaaagcaaattgagtaagcagatgtgaaggaccatttaaaagctaataaaattggtcatgattagtttatcttagactgaaatttcagccatatttcaagctgaaaatatcaacaaaaacattttcaataattttttatgtcatgctagcactattgccaaaaaggaatagtggtgaagttattgattacaagcatgtttaaagcattaatctatgatttaattaaaataatttaaatataatagtgagcaagatttgaggtatctgcatatatgtatattaagaatagtgaaaatcagtaataattatttctttgatattccacatttcctaatgctgctgtgagtgcatttcctgaaagttaacatatgctcttctttttaacctgaaaaatatctagtatcctttggacatcatgtttatctcaacttcctcaactcagtaatggaaaatgaattaaggtaacttgaaaaatctgccatgaaaattatgtggaataatgtaataaagtactgagaaatatgactgacctgtaataggcattcaatcatgtgtatatcaaaaattctactacactatacttataggtctctctggtgctgtttcttcccttcctctctctctcaccttctacctgtgccccagccaataatcaagtcattttttcctgtaaggtggcaaaatgtcgagattcattttagcagagaaatgacttgttttacaaagccattccttaggcttctaaaacagcatacgaattgactctagttgatcatgaaactctcccacacagcttagcgctgtgtgctgagattaagttcacactgattagaattttaaaattattttactcttcacagtgccttgcacagaataggtactaaataaaaattatgtggttattcaatagatgtcaccaaattcttaactcctcccaagctgattgttttgaaaccagatgtgctggtatagagttagtatacttttgcagaggaaaaaaatagccaaaacaaatacagtgctgttaccataaaagaaaatcaatattttagaccttaaataaaaggaagtgtttgacatttgtggctttctttaacaaggacatagggacccagacagggttggctgaatatttgtggtgctctcagtttatagacacagctgaagcccagtgaaaatattttgaatgtacaagatgttttcaaagatgctttgagtgcacaagagacaagatgaagaagacaagtttgtttttaatgaaaaaaaaaaagcaaaaaatagagacaattcaactataaagggagaattcaaaatttagatgtggcttgataaagtggaactagataaatcttaacaaagttcttggaaaatccaggacctcagtctagaaagaaagagtaactgcctactgaagcagaactgagtgagtgaagacatatggaataaattttcaagcaaagcccccaaatcaaataatatgaatgagttgaagaaatagcagtacactttaacagagaaagttgagatcaaaagacgtagtaataaagctaataagaaaaactgagataactagataagagcagattttgggtcaaattgtccatttgtgcctaggtatttctttctttttgtcatggcatactgtagtttgaaggtgccttcagatgtataaatgagtcccttgggctttgcaagcaagctttttgtgctacctgaagctcctgattatgattaggaatgttccatttgtctggcccccacactcttgtcatactttaaagatggttcctgcaagtaagtggtaaaatagagcaattatcatgttcatccatgtctcctggtaccttattcaggaaggcagatggctaggcaaaactattacccagaagtatagaccaagaagtacaaacgtctcttaagatgacggccatggtgacagtagggccaagtgaatagtcaaacaaaaaaacaaagtggcaattttatagatcaccatctaccctcaaagccgttgcattcataatactctacccaatgacatatttgtcacataaacaagaggctgttgttcccaatgtttgccctcaagttgttagttagctgctgacctcataatctgcacagctgtggcatcccaatgtgttgtcatgaaacagattgtgatgtcttaattgatcactttcagaggttacaattgtcaagtgagaccagtgtgctggtctcacttaattctatattaagccttgttacagcaaaactggctaattcattataatgactaggaaatccaatgtaatttgctgcattttatagatttgaacatatccaagactttttctttttcttctttttgattgtttaaatttgtggaggctataccccaaccatgcttttattacacaacgaagcaacttcttggaatagcaaatggaatgtaaccccccgcaccatatgcatcttggtgataagttggagtatgccatatgatacacacaatttaaatcaggcattgatttgcatgactgtaagtgaattggaggactcagctaagagtaatggatgtcaggctctgctgcaagccgtctggcaagaagaatattatgttcttctctattgtgtaaaagaaggtaggctcctaagaggttgaggaagggtcttaaatcaatgcgtgaccccaaagggcacttccttgtgcctccattttggtcactggtgaagtcttcactatggcactaacctataaaactctcttttccaagtgtcctaatacactcattcaccttgtatggatctattcccatctggtgcctggaccacctgctactcacattagttgagaaaccttactgtgttaggggtgatgaacagtccctttaataacagagttttaagacaactcataaatgggccctttgtgcattctgcagtcaagtttttttcaannnnnnnnnnnnnnnnnnnnnnnnnnnnnnnnnnnnnnnnnnnnnnnnnnctaatttaagttaatgtaataactgttagcatccaaaatgcaggaggaagaacaagcatgtttatcaaagcacttttttatagtgagcaaaaaaaaacagataatagctaaatgcccagcagtaggcaaatcggtacatatggtatatccctataatggaatcttgtgcaggcataaaactatctctaagggctgacatgggaaaggctgatgatttttgattaatggtttctcattaagtaagaaaccaaggtggccaaagaatataaatggcatttctcaacctgtctaaaataatatctatagaaaggaaaaaaatatgacaaaaatcggtgtagtgttattgagtgatgagaatatggagaattttttaaatcattttgtccattctttttagtttttgagtttcccatattactttactaattagggggaaaaagtttttaaagcagtttgagtagtttcaattcaataggctgtaccttcagaatatttccagaacataagcggcttctctccatctcctttgctactcaacatggtccacatcactatcctctcttgctgggattgtagcagcggcctaatctcctgcttccaccctggcctcttttttttatcaactttccacacagttgccaaagctgttaaaatgtaactcagctcagtcattcctctgtcccgagcccttcaatggcgcttcatctcacgcaaactgaaagaccccaagtgatttctcccctgctatctgtctggcctcagtacctacttggctctccccactggctctgccaggctacattgctcttcctattcctttcctgcctcagggtatttgcattggtttttgcatttgctctgcaggaaagcttttttcctaaatatgctcatggccaactctttcacttcattcaagtctttcctcaaagattattttctcagcaatgtctttttctggttactccaccaactctctctctctcacacactcacacacacacgtgcacacacatacctcttaacctcctttcctgctttaattttctcgatttagtacttagcaaaatttaacatattatatgggatgatagtttatttattgcctttctcctgcacccaacttgaatataagctctatgagaacaggagtttttgtttatagttttcactgctgaattctaacccctggaactgtgcctgacacatcgcaggtgctctatgactgctgtgagtgcctaccattgataggaacaatggtctgttacagttgtatgatgactaactggttgatttttatgcagtatcttacctctcagtgtagttattttaattcaattgctttcacttcctaacttaaccaactgagcctttaatgtattccagggactgacgggggaatggagttaaaatgaaaaagataggcattgttctgacatagtttactgtctagtggacagacataattaaacaataaagtccaacacaatacataaaacaaggatagtacccagtcgagagaggctactcaccaacaggcacaataaaaattcaagatcgaatgtcagatgcaaaatgtggaatctcatagaagggagatgagaaagatgtatatcaaaaaagcacattgcttctttattactgttttaaaagaaagggtgactatgtgggagagaagcagcaaaagcaatctatttggttgttttaggagaactgaaagcaaggaataacggaaagggcagtgggcttagagttagacgatctagatttgaatctaacactgcagctttatcatctccaagtcctgaaagctgatgcttaacttccacgagtctctattatctccgtggttaaataaaaagggagaaagggacttagactaactatagagactgtctgtgtatataccttcccatctaaaaggaggcctttccttatccatctaggataaacataaacacagacgccaattaatatgatgacttgagggaatctctgaagggtctctgtaatatttctgctagcctgggacttaccttaagtagttactggttctgaaaatctgttttataacctcattgcttgctgaactcttcatatttttatcaattgctcataaccattcatgcatacaggtaaaatacataattgatccctggatatgtttcttttgcatttcctttatagccaccaaccttattacaaagatcaaatcttttcgtattttcttatttcacctgaaattacagttctgaataaaaatatttatcatttagagtggaaaacaaataactattttttgcctataattttaaaccagggcgtggggattatagaaattaaaattattttttgacggtatactttttcttttttaatggaagcatgctgttaacttgataatctgtggcagcgactgtaggtttggtatttgtaggtacttcagagatatttccatatttggtaattatacaatatatgaacttttgttttcccataggaacttgtttgactaagtggaatttactaatttacatgccttctttctctatttttcagcctttgcaactggactgtgacctttgtgccatagtgtcaaactcaggtcagatggttggccagaaggtgggaaatgagatagatcgatcctcctgcatttggagaatgaacaatgcccccaccaaaggttatgaagaagatgtcggccgcatgaccatgattcgagttgtgtcccataccagcgttcctcttttgctaaaaaaccctgattattttttcaaggaagcgaatactactatttatgttatttggggacctttccgcaatatgaggaaagatggcaatggcatcgtttacaacatgttgaaaaagacagttggtatctatccgaatgcccaaatatacgtgaccacagagaagcgcatgagttactgtgatggagtttttaagaaggaaactgggaaggacaggtgagccctctctgaagcagctttattgtcttttattatcttttatgctaaatcttcgccaattccttttgcaggatataaaatgaacagttatttatttacgctgattgttatatgttttgactattatgattacttgataagccagcctgaggtctcatttattccacctatactacctcctgttctttccattctgattggtttgagtctccaagaaacactggatacttccccaaggtatcttttgatctttttttattttgttccatttgctattgattgagttggatttcagctgaaagaggaagcctaaacatttctgtttcaaaacctagtaatggtaaggaactttaggattatgcattaatctaaactcctctgggaattttgccaaaattttacctgagaccacaaacagaacaggctactgattctccaataagattgtgtagcttcttgcatgcaaataggcactgtgatcctgaacatcataacttggtatctaacttgttcagcagaataccatattgaaattatacgtcccttaaaatcattagcagttgaattattttaaagaaatgaggtataaatactattcattcaattatccaaaaaccaatttgcattttttattacatccatgttttttctgtagcattctgtaaactacacttcgcacttttttcccttgaagcctgctttcccctccccttccttctcctatttcctctgtttgctccatttccagctccctcatctcttctgtaactgaattgtgtgccatgttttctttctttttagaaagataactattaaaacagagaaaacaggaattacaaatcagacaatcttagttcttatatctagcgctaataaagaactgttaagggaagatattgaaaccaatagctaaagttttaaattatctgtgaattttgcttatttgtgcaatatcatggataaattgagcatctgctatagttccaatattagcattccaattttttcaaaatgtatgtatttcactattcaatattatcaaatctaagcttttaactatattgagctatgtgctcagggaggtgcagtttctgatatctctggatgtaatttgaatgctgatgattacttaaaaaccttaggtggatcaactctcctttggtaatgtgggttgatctgaatttaacattttctacttctgagcaccaaaaatacacagcttcatatgaaatacaagacagaaatagccatgaaatactagttcctcggactgtatgagttagcaagaagaatcccaagggtgagatttgaatcaatgtagcataaactgtccaaaatgacaggcagtagagatgaaagggataggtatggtgcttcaaagaaaaatggtcatatgtcacattattctatataaatatgaagcctattcacaaagggctttggaaatttctgatctctccttagcccagagcaatgcaattaatgaaatgtattttggtttttcattagttagagttagccctcagggtatcacccagacatacctataagccctagagtcatttgcggggaggtatcagagaagagcttagcatgctgttggttcatgtttttatgtgtttatttcacattgacttttgccgtgagctttgagggagacaacaccatcacatatgtgtaaattgtaaaagaattgggagagaatagctttgggagatcattttcttactggccatgatgaagaaagctgtatcgtaggaaaattactaggtaattttactcacttgataaagttaatttgcaaggtatcattcgattggtagagttaccaaaatgagagttaaagaaacagaaatatggtttcagtttatggtgcattcttatctttttcactgagtctatttctgtctggttgcttcacttagtactccaaccagacaagagaagacaactatgctagtgttttagaaatggacagaatgggtgatttaagtagagcctggttggataataaaatgttgatcaaaatgacctcagaagctgctgttcccaatctatatcctaaccccatctatgttaaagacttttattgtctaagaatttcccatgacaatctgatattcattgtcaaatttcaaactagaatatatttttcaacttttcatgaaggaaaatgtcaaacttatagagacactagtggtgtaatgagcctctgtataaccatcacttagcttgaataattattaattcatgaccagtatggtttcatctatacccctacacactttctctctcaccaaagactatgttgaaacaaatctcagatatcatataattttatttataaatattttggtgtatacctctaaaagataaaaagtcttaaaatcaatacaataccattgccctacataaaaatcaacaattctgccttaatatcattatatatttagtttgcaaatttcccaattgtctcattgatatatttttcatagtttgttttaattaggattagcataaggtttatacatagcaattgattgatatgtgtcttatatttctcctaacctatatagaaacttccctgtctctccttctctcttctatctccctccctgcctgttgttgaaaaaacctaggcattagtcgtacagagttttccacaatctagatttgttaatcacattcccatgatctttctttttctgctacactggtatttatgtattgaggcttggttggattcatgtctttttttttttttttttttttgccaaaaccattaggtggttcttctctcagaagaaatactctctagttttctctttttttaatgttagatgccattaatgattatttgctagattatataatgtattaggattgcacaatggtgctatttcatcttatcctttttatttattagctgatatattttattaagagtaatttaccctcttattcatttggttaccatgagatagaaaccaatcctgttctcctctttatttaccagttttaatgtattagtttccttgcattctctataggcgtccactattattaatatttacatattgacttacagacttaaacatacttgaagtattttaatttattaaaattatatccttatgctcagattgccctattttggcctatgggaacctcttcaaattggctttgagtccttttgacatgcccttagtagtctttgatagcttctttgtttcctggtattatggaatgtttcaggctttttttgtacatattccgaggcagacctggattcagacatttctgcaaagaacgtcagtttcttttagtagttaagagagcataatattagcaccattgctgctcattgctactggattggtctttgtttcttgggctttacagaggacagaggtagtatgtaaacaatatatactgtgtatattgtttaaagataaaatcgttatgagttcaaaccgaaactttcaattcaaatccagggctatcaggttttaagtttacatcctctatcttatatctgttccttctttttaccatgctgacaatcacaggtctcagagatttcaatgtaattattcatctgctttattccacaacacacacacacacacacacacacacacacacacacataatcttagaataagaataacagcacaacaagcaatataattatggtaaacactttaaggatattttgcatcaaagaaaacatttgaatggcaaacatttatgtggatctgtgctcacaaagtatatgttggtaatagtctccaaaaaagaacatttttctcctaagtaaataggagtgaattaagtggtatacatcactgaagtcatgaggaaatagagaataaggggtgtccatttaattttgctttaactgtaaagctattttgtttgatttgcctgtagttattagaactttttagcaagtagttattttcatcatcaagtttttaacagagagacaatgtcatcattattatgtataatttatagaattaaaaatatgtcactagtagttaaagtgattcatgataggaaaatgattacatggagttcctcaaagaaaactttgcttctcagcttgcttcttaaaattgtaaaaatacttaaaaaaaaatatagcccttccgtttaaggtaggcatcttttcacttttccaagtattgtgggttttgttttttttttttttttttgagacagagtctcactctgtcacccaggctggagtgcagtggcatgatctctgttcactacaacctccgcctcccaggttcaagtgattcctctgcctcagcctcctgagtagctgggactacaggcacgcaccaccatgcctggctaatttttgtatttttagtagagatggggtttcaccatattgaccaggctagtctcgaactcctgaccccgtgagccatcttccttaggctcccaaagtgctgggattacaggcgtgagccaccacgcccggccagcattgtgttttttttcttaaggaattcctcactgaggaaacatgaagcagtagaagaaatatgtatatcatttaaatgtcttagaataagtttaggccaactcacaaacatattggaatacctttttgaagcaaatggaatttaatttgctttctttttagttactgtctaaaattatttggcttgtcaattagacagggtgaccttgtgggaaaggctaagagagcagatagagtaggttgctttccctttctgtctttatcttctggggcccagttgttttttttttctttctttctttttttttttttaattctaggttcattggttagtggtcacttttagattgtcacctaccaatatacttctggaaaacaagtattgtgaattctacagaactttcatttcttccagaaatctttgaaattaaaggttttatattcaaaacaacctggaccaaaataccttttcccctttgaatgattggtatgcataaataatactagcctgctgacatttacacatttgcattaatacatcttaagactgaaatatgatggaaatgctgtagggctgatagtggcacattgtgccacacttaacaatgaagaatgtgatcatgttcctggcacacacatatgcaaaaggaatgttaacttttctagagaagcagttgagagccaatgtgagatattctgctttcctatgggtaggtgggcaattgcagcttggatttcactttagaaatatgcttgcaaatataggcacattatttaattaagtaataattgagaaagcgatagtccccattaaaagagcaaagctaattctgggctgttaaaggactctgagctgccctaaataggtcttaattagctggtgccaatgtggctccaccttcagggatggatgaaattaatgaaagctagcagcaaatagaatcaatatttcaagatgttcctgcctcaggtgaagaggatgaaaagaaagggagtcattttcaaagactgtttaggaaacaatgcacataaatcaatttctaaaaacataaaatgggacactgatttgtgaatacagtatcaagatctctacctggctcatctttgccagcctgttccatccattcccactcaatcttaaggagagaaaaagaaatcagcgatgtgtcattcctcactatctttgggggtgacagttttataagctagcaagggttttaagggcagcccaggttttgctatttcagcttggccattttgaaagtttcttgtgtcattgcgtggtcaagtgtagagatgaaattggctctcatccctcaggtttgcaaacctttagtaatatctagagtggaaaggggtttcaagtcttcttccttgaaaatttgggaatcctcttgtaggtccctctgtcaacacacaaggaagccgccttaacacacacagtgtagcttgaaggtggagggcaaaaaccaaaaccaaaataaaacaactatgctagccatatcttagagtcgccatggggtacagaaatgtgcatagtttgcccgaagaaatgccatacctagattccacaaacaaagatgtcaggttattcctaactcagaataaatacctgctaaccccaggaaaacttcgaccaagagataataggcaaaagacagtattaaaaacagtattttccatttttttttcattttgaagatggtctttgcaaatataagtatctcagcactttttcaggagcaatgctgacaaacctctgttagaatgaattaatatccccatcccagctggtgtatttggcaggaacaaaaagttcatgcagcagtcatgggcagatccataggactccttagtcaaaaagcataatactgcattcagggttgtgttttcacgctaacaagcattatgaaacaggggaacttcctttttaccattatttatgatggcattcagtgacctacattaggcctcctctgtaatacaaatgcgctggaaattaaaaattcaaaaaaaaaaaggaacgatctattttaataatgggaggtagggaagggcatttgtaatttataaagatatcagtacaaacctttcatgtgtttaaaaacaccctcatgtgcacacacacacacacacacacacatatacaaatgcactgggtgaaactctgatgtatttgacaagacaatttaggattaaaacaagagcaacatctcaagttcagtgatcatattttaaagcaaaaagctgtgcaggacatcagtggttgtggaaatcaagacttccaagcagtctactgagtgaaataaagttctctgggccagaggatgacttgacagaaggccagattctcagaaaaaattatactgtatagaaaaaaaatcccagtagacatgtatgctcaacagttctctagatgtagtggcttttaaacccccaaagggtgtgaaactcaaaggcaaaagtaggccttaaatgggaagcttcattaaaatgtatacagacttttaaattttatacaggctttaaagggtttatttatttatgcatcatgggatctatctctgtagttgacttacttctctcttacaattatttctcctctccttagatttttttttgacctatgcctccttcttcaagtttagttcaaaattaagacaagtaaggatagttacattcttgtctttaaaacatatgagccagcagcaatctctgttttttctctattcttggatgcttgactctttttaagacagagttggttgttttgaaaattttcatcctatactacgcccatctgtactactagatgtttaattgcttgggcaaatatttcaaaatacctttcactgtgtctgggatgttataagagctctacagatgtttgccgaattgaatttttgcttctctgtaaacagacttcttattagatatggtattactgacctacatggactcctctagttagctctttttctttctttcttttgttcttgtttgttctttctttctttcttttttttttttttgtttgtttgtttcaaggagtggaaagtttaataggcaagaaagaaggaaaaagctccccgtgcagagacagagggaggggtgctccgagcggagagagaaaaaccccatagctccttttcttagtgaagagtaggtcctctagatcagtacagtgcttttcaaactttaatgtacatcaagccacctgctgacccaaatgatttgaggcagggcctgagaattttcatttttaacaagtttccaggcccggccatcctgttcatctgcagatggcactttgaattatgctattaacaaagtaaaagacattcattttttcttgaaccaaataaatacacaagtcaagaatatctgtttcccaaatagctttgtaatctgcttgtagttggatcctaactttgtgatcctgccctattccttagcaaattaataatggggctcagagaagtccttaagaattcaactggagacttgtgtatctgaattgtgtttatgtgttcatttctttcattgaacaacaacacatgtcctaaggacagggactacacccatctccattttattctcagatctagcatagcggtggttagccataaaatacagtaccaaaagaatgtattattttcactctctgtctttcagttaaaggggccatggatgtttcaagtgtccttaaattgacctcagcagtaactccttttctttgttctattattatcactaccactgctctagtttaggccttctttacctcacacatacgtgactgcttatctagtcctacctctatgttttggcagagatagttccctctgcctaaattgcacttccccctgtcaccatgcacacacatgcaggccatactttatgaacaagtcaaatgttaccttttcatgaagcctcttgtaatatccctacagaattcctacttcccctgaaaatcgtagggttatggacttccttgttatagaaataataactttctaccatgcgttattgttatttatgtttaatctcttcaagtggtccataaactatttgagggaataccagccttgtttctccaagcaccttgacataatgcttgactttaataggtattcagtaaagatttaatgggtgaatgaataaataaatggacgagtaaaagaagaaataacacttaatatcttttttaagcttaaaagtccctttgccattgttgaaataccagtgaatttcaaaatactttttttcaacaagaagggtcacagcaatgccaaagaggcaagttctaggattggattttgatagaaaagtttccacagttctatttagagagaccacgtcttactttactttacccaaaggctggcaaatctattaccttctctagggattttgtgattgggcactgggtttttaataagtaactggcagagccattcctcaaatacaggtttccattttagtttcacttcagttgtgaagcaaattccaaggcttcactcacaattctgttagctgtcagttgcctggtgagaaagcaaatcctagtacccaaagtcaaagttatactcttgggcttcaggaggcaaatataagcaccaccacagaagtcagaaaacaaaatacccaagtaaaggagaactgaaaactctcataaaacaacctgagcttctctaccaaactttaaattgccctccagaaaatattttcttctttggtaacaaagaaaataaattgccttactttttaaatgccttcatgatgaacataaagaaaagaaaaaattggtagttgtgtctttcaaccaactgcataaatgaagaataaatttgtatatagactaagaggaaaattaatgaaagcatttctggcatattcagatcatgtcactctcctgctcaaaatcctgcaatagtcctccattttccttagaataaaaacacgtgtttacagtgacttccaatcacttctgatgagtctaccatgatagcatttaaaattgaaatccttacctcacatacccagcattcccaattttccttaccttgttctattttatttttttctcttatagcattaccttctaacattctatataatatacttatttattttaatttttagtgttttctatgtatttctcctactgggatatgagttctctaaggccaaggatcattgttttgttcactaatatatctcaagcacctagaagaatatatgttgtgtagtagacactcaatatttgctaaataaatgacctagaggtggaaaaacaattgaataaaggattcaggcaaacttgcaaaaagttatcatgggggtctttaatcgcttaaagaaaaaaatgcatccactcagaaacagtgcaattaagttacaagtttaaggctgttttttctgctgttgttttacaaaaaggtgctagtattgaagctgtcttatccaagagatcatcattgcactcaaggaactggtctgactgatttttattcttcaacacatggaccagttgtttaaacagaattgatttctgatttctttggtatccaggggaaacagcaaaaatgtctcattcttatttggattagtagaacagcggttctcaaacgtgagcttgcatcagaattacaaggggtgctgattaaaacacagattgctgggctcattcctggactttctgggttggtatgcttggattgaggcccaagagtttgcatttctaacagaattccaggcaatgttgctgctggtcctgggatcacacttcaagaactaccgtgataaagaattctaagatatcaagtcacattcaattattttgaacatttggtcctataatctttattctattggcatattgttgcacgaacatctagcactatttttgttatgatatttttcacggcgaggagttttttaacctcctgtgaaagtcctactgcaactctgtcattttattcttcactttcttaagatcttgctcctctgtaattataccagatggtgctgctcagtagcttataagggagtgatgcttcatcattctagacagagagacaaatcactctgttctctgacttttgaatcaagaatcaacatttgtgtgtatgttcaacctgctatttgctttgcaattttgctcattaggtatttattaccctgacagtgtatgagttagtcattttccttctgccgtgtagttcagattagcactgtttgacaactgccatcatcacagcattacctccaataatatgtaatttcttttttgcctatgttatctgggtgaggtagttatctaggaagtatatctacaaacggaagatcacaaacagcattcagttctctgacttatcatgttagaaatggataactagggccatttccttggagtttctagccctgcgattggcattgctgaaaagaaaggaatattatgaccaaagccaagcgttctttttcatttattgtatgctttttctatgaagaaggtggtatgagggaagcatacaatttaatgagaagcattgaaaaagaacagaaacatttattaagctctactggcaaaatggataggcaaccctttacagaaacatggaaaccatgcagagcagagaactggttaaaatttagaatgtggaaaacagtcttatctgagatattcaacaattggagcaaaaacatattttctttttctttataatcttcactaaaaggagaactaaagttattactagataactcatgcaaaggcactattacaggcatgtaataacattcttctgacgtgaataggttgtttattctctcctaaaatacttctctacacagttttaatattaaacttatgaaattttcttgaacttttgttgattggagggtagtagagagagaaggggatatagttgggagcttttgggaaggattgtcaatctatcttaattcttctagttgatagtagatttttgaccattaaatctttactaacaaaggtgttaatatcctcgtaatgaaatgagtgtcctacactacatcagctgtatcattgtggaggtacaaaagctccgaaggtaaatgcaaaacaaagaatggttgctattccaaggtgactttttcatgacatgttctatatttctgatatgtcttctagtcttaacctgtgagttcatagcaaacacagttggttttatttaggagtgcattaaattttattccattgagcaaatttcacttttgcttcatagtgattgtaattaatttgctctttatcttctctttatctttacttcactcattactcatctgacagctcgccatcccatcttaattgggagagaagacccttccaaaagtgaaccattggcagttctgtcatctggaaagagatacataaaatgtgttaagaaacagaaatgactatataactggttcatcatatttccttagcaggtggattcttggtgggcaaagatcatgttc

SEQ ID NO: 830 - DNA, 1638 bp, Homo sapiens
agttttcatccctcattacctctgtcctaggcaattgggatagcctcctaactagtcactgcctacctatactctctccctgctccaaagcatcttaaacactgatgtttgattataactcataacttccccccaccccgccttttttttcttttttaaaaaattatactttaagttctgggatacatgtgtagaatgtacaggtttgttacataggtatacatgtgccatggtggtttgctacacccgtcaactagtcacctacataaggtatttgtcctaatgctctccctctcctagccccccattccctgacaggacccggtgtgtgatgttcccctccctgtgtccatgtgttctcattgttcaactcccacttatgagtgagaacatgtggggtttggttttccgttcccatgttagtttgctgagagtgatggtttccagcttcatccatgtccctgcaaaggacatgaactcatccttttttatggctgtgtagtattccataatgtgtatgtgccacattttctttatccagtctgtcattgatgggcatttgggttggttccaagtctttgctattgtgaatggtgctgcaataaacataagaaagtctgtgattgctgtgagcttcatagcagcgttccttttcctgctggttgtgcgtcttgtaaatgaagtgaatttcccattgctactaaactgctttggacaacctggtacaaagtggataccattctcctacacatacaggcggccccttcgaactcactatggatacataaatgtgaagacacaagagcctttgcaactggactgtgacctttgtgccatagtgtcaaactcaggtcagatggttggccagaaggtgggaaatgagatagatcgatcctcctgcatttggagaatgaacaatgcccccaccaaaggttatgaagaagatgtcggccgcatgaccatgattcgagttgtgtcccataccagcgttcctcttttgctaaaaaaccctgattattttttcaaggaagcgaatactactatttatgttatttggggacctttccgcaatatgaggaaagatggcaatggcatcgtttacaacatgttgaaaaagacagttggtatctatccgaatgcccaaatatacgtgaccacagagaagcgcatgagttactgtgatggagtttttaagaaggaaactgggaaggacaggaagagcttagcatgctgttggttcatgtttttatgtgtttatttcacattgacttttgccgtgagctttgagggagacaacaccatcacatatgtgtaaattgtaaaagaattgggagagaatagctttgggagatcattttcttactggccatgatgaagaaagctgtatcgtaggaaaattactaggtaattttactcacttgataaagttaatttgcaaggtatcattcgattggtagagttaccaaaatgagagttaaagaaacagaaatatggtttcagtttatggtgcattcttatctttttcactgagtctatttctgtctggttgcttcacttagtactccaaccagacaagagaagacaactatgctagtgttttagaaatggacagaatgggtgatttaagtagagcctggt

SEQ ID NO: 831 - protein, 263 aa, Homo sapiens [sequence omitted]

SEQ ID NO: 832 - DNA, 231004 bp, Mus musculus
  misc_feature (1)...(231004): n = A,T,C or G
atctggcattgggaagagagagacacacttggcatgggtctgaaacctcaaagcctaccccagtgacgcattccttccaatgatgccaaaacccctaatagtacacatgttctatgggggccatttgaattcaaaccaccataggctgtaagcccagcctaatgtgaagaaaatccttggaaagcattttacaaaatgccagatcagtcttccttaaactgctagtgccatcaatacaaaacctgataaagaaagcggaggacccagatgatctagggaaacacaatgatgcccttaatgaggactatgtaaagaagatctcagcaattaaaaacaatcacacacgtacacacacacacacacacacacacaaacacacacacagaagaatgaaaatcctgggaaagaggtactatttgtaataatatttaatctgtaatatcttagtgttgaatggattttaatttgcaatactgtcttcctgttgagtttcagttgtgactcaaaaaattaaagttatttaaatatattttagaggttggggatttagctcagcggtagagtgtttgcctagcaagtgcaaggccctgggttctgtcctcagctctgaaaaaagaaaagaaaagaaaagaaaaaacaaaacaaaacaaaacaccaaggtaactggcacacacaaccttatatatatatatgtctaaaagatggccactttataaatttattctacttttgaggaccccagtcctcttgcctgaagcagtggattagggattcccaggaactttcctttcatccagatagttttattctggaaataatgttttaagaaatgaatatatattaaattatttttgaatcaatgccatcaggaacataaatgctcatataatgtgactatttacattaggaatattcttgactgaatacacactggaaatgataacttcacggttgctagggtataataaggtctaaaaaaatgagctcacacaacaatggggctttcagagtttaattgaaaaacatagtcacatgaaggtaactggagccatgactacaaatctttctgaaaaatcatcatctataacaggctttttcttcatttattcctagctctttcatatatatcacaaaagaaaaagggaaaggaaattggatacaatagaaagcaatgaaatctgcagtcattttttttctattaaatagatctgtaattgccattgcctctactctttcaatccctttctttcagatttttatttgggaggtactttctcaacagttttcttgtttgttttgttttgtttgtgagtcattctagcactggactttcctctctcaggatccaccttctccattttgaggtgatttgtagtcaaatggtaagtcgtatggctaatacataaaaaagacacagatcagacaaataacagtttcttctctctattgctcattttccaatgggaaggagggagatggaaaggggtagagagacggggagggagacagagacacagtgatagtatgtctgtgtagttataattttatacatttttattttatttattttatagacaaggctttctaggtagcccaagctaatctcaaacttgtgttgatcctgctctgcctcttcagtgctaaaatgatcggtgagaaccattcttctcgatttgcatttactgagaaccactactaagtttaaaattcaactgtcacttggtttactatcaatctgaagcagattgataaaatatttaatgattacaattaaccaattgtttttaatgcttcaggttccttggaacattacatccaaactcccatggtattaggttacaaaaagaaagaaagaaagaaagaaagaaagaaagaaagaaagaaagaaagaaagaaagaaaagaaggaaggaaggaaggaaggaaggaaggaaggaagaaaggaagaaaggaagaaaggaaggaagaaagaaagaaaaagaaattgtctttaattaatagattcatgtgtacatcttaaggtttgctcagtaggtctaatatctcaaaaaaactgacttgattgaatttaataattcaaattagtcaaggcagattttttttcttaatgtaacattaagtattttgttcttattttatccttcatacatagttttatacttaggattgaaatctaaaaggaaagacccgacttttaaagaattagcaacttgttaggcattaacttctagtagaatatcactgaaatgctcggatctagtttttagtaaggtttacgaaagactcaatcctttgaggttctaagatagtatcccagggacacacatgtgccattcttgatttttctttcagatatgaaaggtataaaaggtgtgaacaagtctaaggagatgataaaatggaaatgtcccttcttcaggcacaaatcagcaaagctttaaggattagaactctatcataggacctacactattggggagaggaattttaaatcttcccacattaaaaaggctttacattgaccaatcctaacgattttgtttttataatggaagagttgagtcccaccaaggaaatgtcataacaggtcttctgtgatattgggcattcatgtgtttcatcttcctagttcatctggtccatattcttaaccctaatcgattaccttgctcagccatcagttgtaagaaccacgcaaactcactctccagagaaaggtttctctcaaggccaacaggcttgtccatgaaactgccagcttttctaattagtccaagaaaaactggcctcagaggaatgcttccatcttaagttattgagtcatcctttcctctttgtgtgtttccatgaaacaaccaggtcatctttgtgcagctgaccttaggatggtaaatgctgtgctacatcggttcttaaccagcagggttgcaaaccctctgcgaggtcaaacgacccattcatgggggtcagttaagaccttctgaaaccacaagatatttacattatgatttataaccataacaaattatagttatgaagtagcaacaaaaatacttttatggttgggggggcgtcaccacaacatgagggaggaactgtgttaaagggtcacagacttagagaagttgagaaccactgctctactaaaatgcaacctcttcaaaggcctcactcctttctcagctacatgagaaaaggggttttagaagaaggatttaattttaattgtgtatcataaaatatatatatatatatatatatatgtatatatatgtatgtatatatatacatatatatatatatatatatatatatttacacttagataagtacatagacagatggggacagaaaaacgtgctattgaaaatattgcaaataaggggccatttgtgacattgggatcactcatgtagggacaattttgcctaccaaaccttaataccttttgtttgggtaagatctcactgattttccctggaaagctttcacatgctaactctggtgactacaactgtgggacaaaaatctactgtaatcctgagatcacatggcatgctgtaagcagaacagaggaactgatctgggaaatgaacaagtctctctccctcaggatcagtgctttgctgagacagagaggtatggtcagagtagaaatagtcagaacctgtgtggatctttcttggtgtaaccaggagaaggcagtttctctcatcacactgaggactgccttgagctgccagggattgtgacaacagcatcatctctgaaaaacacaactcatgaaggagagggtacactctgctcccctaatgatgtccaatttcctttaacagctttttcccattgatagcactgtttgtcacatttctgagacttgagctaatgaatgccacacttttaagtaagcccaaatcaggaagaattcctgttttcaaggaagtgactaagattttcttctttagaaatacaatgagaagaatgcttcagaaaataaaaaaagtgggattctaataaagatgatgttatcttatttgttctttactcagagactatgatgtcacaattaggtattgtacactgacttttagctctgtttttgaagtgtgttatttgtacaataattaataataaaatgtttagccagttctactaacattataggaaagcagctgcaaagaatttagcacaggaatgtgcaactattttttggcatgctttaaacttctcatctttcataattccctcctttcttttcataacagtgtattttaaggacagaagtcattaaaagtgctgacactgaccattgctccatcatcattttgttggtggagatgtgagtatgtgtgtgtgcacatgtgtgtggaggtcagaagtcaaccttgatgttgtttctccagtgccattgatcctgaattttgagacatggtctctcactggtgcctacggcccacagattaggctaggcttgctgcccagtaagacccgggtatctcggagtctatggcttcccatcattggcattacaagcccatgttccacacactcttccccccagccagatttttatgtgggctctggaagtggaatacagatccttccccctttatgattggcaaattgctgatttaacaatctcctcagcttcctaccatcatttgatgggcttctctttgttcctcagaaggactactgaaacattgaatagtaactatatagaaagaaggtattgagtccaagtactgaggaacaagcctagtgggtaaacaaggttttactgaacaagactccctaaccagttggataaatttggaatactgctccctccttttgggccagctaagcagtaagtgttttgcttaatgatacacatgcatataagtgaatatctaattatgcatgcagtgttgtgaaatcaccaggtcaaattgatttcaatgtacagcacatcagcttttgaactacatacaatgagagaccttggaacactcagccctaaatgggatgtctccattaaatcccttttctttgccagaggggatggaagacacctagaaaacggccctcaaaatcaacatgggcaaaggtcataggaactcacagagtctgaattaggatacacagggcctgcatgggtcttcacctgccctctgagtatgtattatgtctagtatttttatgggattacagagtgtgcaaactagtgggtctctaatgcttgttctctctcttggattctttttcttctgttggtttattttctccaacttcaatgtttttgttttgccttagtagattttattttgttctattcttttaaaataatgaatgaatgaatacctagtcactaggataaaggttaacaattgaactgtcacttattcctgctaggagagggaaaatcagttttctccaatagaaagacacgcagtatatcaactgctccaggatagatataatggtcaggagtagctgaccaatatctacatagtttgtgtgtgtgtgtgtgtgtgtgtgtgtgtgtgtgtgtgtgtgtgtgtgtgtgcgtgcgcgcgcgcttttgtttggttacagttcaaatttttttgtttgttttttcttttcaggtgttgttttagttctttagttttttggagggagttgctatattaaggttttttgtttgtttgtttttgtttttgtttgcttgtttgtttttttacttatttctggagaaagaactagaaattgggtaggtaggtaggtagataggtaggtaggtaggtaggtaaaggatctggagaaacatgggggaaggcaagaatatgctcaaaatatatttaagtttaaaaattgttttaaaacaacaaaaccacccctagagcacagatgttgggtactcttgtacttctggttcagcagtcctcctactgtggatcctatctgctattacaaccattcctgattcatgtatatatatgaattcataaatattatatgaatattataataatcttaaatattatagttttcaactctagcttcttattaaatactttttgtgtggtaattctcatctgaaattcttatcttctagttttgaagatgtgcatcaaggttctttcattatctttcatgttttattatttatattatgagtgcatttggggtgtgtgttttgcctgcatgtgtatggctgtgcactatatgcatggatggtacccacaaaggcaaaaaaagaaaaaagaaggacaaaagaaagaaagaaagaaagaaagaaagaaagaaagaaagaaaaaagaaaagagaaagaaggaaggaaagaaagaaaagatatagaactctcttggaaccggagttacatgtagttatgaggtgccatgtggaggctgaaattcaacctaggtcatccagaagagcagccagtactctaaacctctgagctacttcttcagaccctcttagtttattttactatatttttatctgtgacaggattttactgagtttccaagactgtagttcctgggctaatgtgattctcacgttagcctacaaagtgtctgaagctgtaggttttagacttgcgcccatcatgcccagcaaggttaaattcagaactgtgtctagcaattgagttacctacctcacaagttcatcttgccacttctctgccccaattctgtgtgtactgttgttttatactatgctaccagtaatatattttaaagtattattgttgagttccagatgtcattttaatgatctgcatgtattcgtatttatccaagtactacctcagtgggaatcttcacctttgtgtgtgtgtttgggcgaggtaggggtggcagcgtgggggaggggatccttcagagtccccagctgccattgctggtgtttaaaggtgttcctccctctctcaggcagtttcagcttcaaagcactcttggatgtgctgcttggcttcctccttactcatacagtctcacgctgtcacacttattcagcactcttacatctttgagtgggacgaatagaatatttctatgggagagcctgaacgctccattcactgcaaattcaatttggtgtctcttagcaaccagatactgctaaaaactggagatggtttctccttctctgccatcagcctttcctgagtttctgagcatctttattggttcccaatactaatgacaaatgtctgaaagtagaaagaattacagcaccaagttctcatggcatcctaccttcctggatcttgggcttctacctgcactactcgggcaactcatcagctccttacagtcatgtttaaaggagtcgaagttgcccaggggatttggtaggagagttggtcaagtccccaagcacctttttttctgaacattggtttgtttgtgctacttggacattctttatattgagttctttgtaagttttgtgaaaattccatttcgatttacagaagatatatagatttcaaatgtttgtgtccaatctattattcttttcctgtaagacttcaagtaattcttgagagcaagtcttctaaatcctcattcacactcataatctttggactttggcttttttataattaattaattaattaattaattattattttttaacactccctctcacaatccctccctcaccacttaactttggatttttttacatgtaaatttatgtttaaaatttatcttcatttcattttctttcacgggatgttttgaaactatcttttctttcaggtatttaacaatagttagttaaatacatctttcttcctcactggcatgaaattctaccttctgcaaactggaaactgtaatatacagtctctttacttctgaactcccattggtctgactttgagtaagccaatcgttcctgttactgactgaacttcagtaattcattttaccatgcttcagctcagagatagtaatgatttgagataagatggcagcaatggcaatacaggacaaggtcagaggagtggccttgaggactgtcactcatagagcttgagggatttggaagctgtagaaaatgtctgttcacatacaactttaggccttctggctttgcactctcaaagatgggagagtcattaattttatgattgaggatataggagaaacagattctgagatacaagaaggatctctgtgttaaaagcagaagcagggacatactggatctgtataaatatctgatgatatagtgaattcttctagtgttggctgcaaggatagaaacttgagttataagttaaagatttcagatgaaatccagcattgattacataccaaataaacttactgcagcactaactctaaaaatgtatgatttttcaagaggcagccctttccatattctaaaatcctatgaaatatgccaggaggctacaaatagtgttttcagtcaagtgagaggcccagacttaggtaagaatgagacagaagctacatttatcaagcttgggagatttaggggacaaaaatgtttcaagggattacataaaagttactagtgaaaatcacttgaagaatttcccacattaaccctaagtttgcctagaatgaaggctagcaaattgttacaagggctgaacatgactctgaagagctttaagcatttagcatttggtagatgctctatcatgatcaagcaatttgtccagaatccagcctgagaatgaacaacttttcatcatagttcatctttatcaacttcaaccaatcttcctttatttatctacaaaacatagacagtctcactttaaattgcaagtataacctctaagatgatgtttgaattaagtacaaagaataggaagcataaaaatttaaaaccaaccaaccaaccaaccaaccaaacaaacaaacaaaaccctagcaccaccacaacaaaactccgatgtaaggcagaggtggtgacacatgcctgtaatcctaagacagaggcaaggaggactggcatgtgtttgagcccagcctgatctcctaaggaaaattttgtttaaaagaaacaaaaatcaaaataaacagaaagattggttttgatgtataaaaattagtttcacaaggtttctgttatttatttatttatttatttatttatttatttatggctttgagcatttttcaacttatgtttagatcataagagcaaatttatagacttcggggcttgtgcagtttatttatttatgtttttaaatctacatttaaaaggagagcttcaaagaggaagcaaacatttaaatatatgtcttataagtagttctttctcttccttttttcctttcttcctttcttccttccttcctttcttccttccttccttccttccttcctttctttctttctttctttctttctttctttctttctttctttctttctttctttctctctctctctctctctctctctctctctctctctctctctctttctttctttctttggttttgttgctttatttttattttattttattaattaatttacttttgctttaaatactttccttctcagtgcagagaccagaaagttcccatcaatttactctattaattcctgagtcacttttcatgtaacacctcctccctccctttaaacttcagcaaaaattttaatgtgtaaagataaaaggtggtttctatgtgtcctcagagtatcagatttctaaaaacagctgacaacagcttcttttgtaaccaagtttaatgtaaaagcacaatgagtatgcaaagctagaacccagatgcagagaggcaacaaactgatatagtgccatatttaaggtaagacactgtgcctgcattctggccatgtccagtgttcatgccacaggccactctgtttcatcacaattttgccactgctgtggatgcacaagaaccagcaacttgccaacctcattactttgggtagtgtcagttcagacaaacacaccccacccccatgtgtttctacttcagtgtcagaaggaaatgcagccgcagggagaacaaaaagagctttacccactgtctcctgcctattctcaagttcttccgctgcttgagctgtttgccctgggcttggctttcctgtgacctccctgcaccaggtagaaactgaagaccagctactgcagacaagtacctccccaccttagggctgtcctaccccgattggctcccatttcacattctgcctgtgtgggcaattatgagcaaagacagaacggtagacaattgacatctagaaaccacaaggtcttgtaaaagatcaggtctatataccaccgaagacacaacaatggctttatctctggaagaatttgtctactcccttgacctgaggaccctccccagggtcctagaaatccagtcaggcatctactttgaaggtaagtatttttctaattctttaatttgatagaatgttcttataaagtctcttggaaatttgtgggagaggttttagtaagaaatacgtggaaggctgtgtgtatagttcagtgattcgatacttagttcaaacatatacacacccagcaaacaaagtgcaagttgtctgaaggaaagttgannnnnnnnnnnnnnnnnnnntcccagctggtgaagaaagaagaaactaaggctttaagaaaggtggagtggaactttgtgaattgccatttgccattttttttcttggtaagcattcgacaagtctgcacaaaggatgttctgtctctgccctactctttgaaattaattgccatcaggtaaaaaagtttaatgttgctgactattgtttttaaactattaaaaacagcaacatcaaaacaaaaacccaaacactatcaagcttgttttgtgttttgtttcacccaaaatgattgcacctatcaagggcacagtcttacaatgaatgctgccaagttcggacttctaagcttgccttgtacttgtaatcctctcttcctgctctacaaactccttaaatggtgggaacttttatttaaaggtaaagaaattagtgcctattgactgtagagtatcttttaagatttgtgttgaaaaggtaaattttaatgaggattgttgaatactaagctggtgaattttggtgtaacttactgtagtgtgtaaaatcccctaatatgaacgatactaacattttaaagttagtttggcctggatggtggtggtacagctctttgatcccagcactcaggaggcagaggcaggtggatttctatgagttcaagctagcctggtcaacagagcaaattccaggacagccagtgctacagaaagaagccctgtctctaaacaaaacaaaacaaaacaaaacaaaacaaaacaaaacaaaacaaaacaaaccttttaagtttggttacatataaggttctcaaaatatttcctagttggatatcaatttttgcttacaaaaaggggaaaattaaagccaatcaaaaaaaaactgggtctagtcaaattactagggagaatggttggcatgtgagctttcccactcacagtctgtcccatggttagatttccaatttttggacttttcactgtagtggaattgcacaaatcgttcagttcttttttccatttgaagtacaatagtcaataagtcatatggaatattaaacacttggtaacataaaataggcatcttgtcaaatgatttcactcactgtgactagtacatggtctgcacacaattagggtagagtaggttgagctgtgattgtgcggtgttagatgtattgtatatatttgagagtttggatgttttcagttcccagtgggctttcgagatgtaaccctatcacaaattaaagaatatttattcagtcttaccttaccaaaacaaaacaggttgacacatgctacctatatatttacacacccataagaggtaatgggttgacagtacttgctctcagattattatgaggttttatgtaagtttttgtgaattgtttgggatcaggtcgtcttctatcctgtcttcctcagaccatgtagggacttatgcttttaagacagctatcagttgcttcttgtcttatggtttatgcttttagggctttatggaagacatctttcgaaacatttaggaagagttttgacaacagttttacagtttcatattttacattcagtttattttcaggatgcaatgctatgccatggtgtacggggacccgactttacatttctgtgcatctttagctgattttccagtatcattttgttgcttccaaatcagatgcaacatttgtctttgaaatgcctcttttgttttgttagttgatttttaaaattaattttggccaatcgtatacattgtataaatgggcagctatgaaattagcgttaatatatgttcaatgtacttctcattccatgtatttttattccatgtttcaaagttaacttagttttttacaggtttttttaaagtacatgtagaaaaatatcaattgattctttaagaaatctaatgaagaactttattggatagtattgatttcatatattaacttgaagaaatgttaatctcatttttattattgaaacctattcatatcattgtctttattctttatgactttactactatgctaccacttaattaaaatgaatttccacaccttaagtatatccatgtaaccatcattcaagaaatagaaaactgtaagtgttctagacgattcatcttacacactttttaattgttatctactcccttccccaacataaccaatactccttgacttctgctccctcataagctttacataaacggaaaattataggatgtactctttcagttggcatacatgtagtgtaaaggtcatctgtactattctatacaatttatttatttctagtgtatagtttttctttttttttcttctttccaatcctagtactggggattgaaactaaggcctttgtgcatgctaggcaggtgctctaccattaagtaatagttcccaacactcttatcacttttcattttgatacagggtctcacttagctccataggatggctttggattcactctgtagcccaggcatatcttcagtttgcaattctcctgcttcagcaaatagagagtccaggtttataggtacagaccacaagatccagttgtgtatagtaatatagcattggatgaatataccaaaccttacttacccactctactgctgatgggcatctggattaaagtcactgctagtcttttatcatgaaattcttactattcatacatgttcataagaatgtaagtaaaattgtgatggtgaatggtatgtatatcatgcttggtgagtagtgaaagagacgttcccttcattcattctacatttccagcattagtctcttgagagctcctgctaacgtgaagacatttcctgtgatgtcgtcttgacttaaatctttccagtaggaacactgtggggagatcaggtgttagttcacatctgccttttgtctactgacatagaggagattttcattttctagtctgcgatatttgcagattctctttaggacatggttaggtatggctcatttatattaggctttatacatttttattaatgacttggtgatatgccgatctgatttctgtcctgagtatcttcttccactgttcagcttaacctttcaccttctcaggagttcctttgcatcaggtgaagttttcaattttactgttaggtgctcagtttacaattacatttctattatattttgctaaggacattttcatttactatgaattgtggaacaattatacattagcttctggaatttaattatttactatttacttcatatgtattctccacatggaattgattgtattatatatgctttgaaaggagggctaagctctatatcattttttagagagctaattagtacagtgacattgagagagagagacagagacagacagtgagaggcagacacacacacacacacacacacacacacacacacacacacagagagagagagagagagagagagagagagagagagagagagtttctatgtatccctggttgtccagatattcactatgtacaagctgattttgaactcatagaaatccccttgccctaggctcttaagtggtaatattggactataccacatctggctggaaaactcttttgcataatgctgtactgggtcccctaataataaatactgtgcatcagaccagggtcttttccagtgacttgtctgcttctccaggactgatcttttcacagtttccctgtctgaatgcacgtgggcctgcagcattatagaacattcaacttatatgctatataaggatatgctgcaggactgtgcttctcaaacttgattgtacattggaaacatctgacatgtttttaagatgatcctcaactggatgtgtctctacaagtaaagatttaattatgtgagagggaaggtatcaccagcaggtcttagacatctccctgatgactctaaagtgcagtcaaactgaaaacaaataatgtggaataaagtttccaatgtgtttttatacttcaagttgggctcttcaaattttcatatatattttagtattaattgtcaacctccacacaagtcctctctgaattctgatcagcagtgacattttagggagaattaacatcgttgtaaattaaatcttccaatctatgagctgggtatgcctctcaagtcttttttcttttggggtagtactgttggtgcttttgttgttgatcttttcattgtttccacatttactctgagtatttttttcacatcattatattaataaatgatatttaagtgactgtggaggcccatgcctataataacagcactggggaaactgaggctaaagtttggaggccatcctgggataaatagtttcaggccagcctaagatatggtgtagtgatctatcttaaaaggaagaaaaaaaaaagagccaaacaaaaaaaaataaaaacaagaaattcttccatgtttttgtttgttgtgtttgctgaattttaagatatgtaggttattcttgatattttagacacatcaaatttggccaggtctgatttctcctttctgggactgtactttcttctttcccttggaacactggttagcgtttctagcgtgaaatcaatcagggttagccgtaaagtttatggtgtcacatttatagccacagaaagcatctgaaacacactatttcaccaataaaggtatttttttccagcagagatttctaaaacataatactttaaattatgttcccaattatttagtaaaagcatctgacccaggaaaattgtttattttttattaaaaacaaaagtaaaatacaaacaatgggctaaagagatggcttagtgattcgggcagcatagtgttctttagagaacccaacgttggttccagcaccatgtcaagtggttcatcactgaagcaagtccagctccagagggtctgatcccacctctgtgggcagctgccttcacatgtacatacctacccacaggcaaacagacatttgtataattaaagctaataaaataaatctttgaaaagaatcaaaatatagagcaatttctagctcaggaaatgttggtagagagtggtcatgtatcctagggtggtttctagaaaatcctcacaagcgcatgtgtactattgttgctatagcaaccagataacattgctcttttatgccataaaatactgtcagcatattgaaaaactctcgtatgaattcttgtagtgtgtagttttgttgttggtgttttttttttgtttgtttttttgtttttttgttttttgtttttttaataccattggctcacctaagtagagactggtgtcctctgaagttatcaagttgctcttgcccttagccatttttcggtttcttcttaccttctttgtatagagcagagatacaatgagtgtaggaatccatgtcttagcttagtcacaaagaaaatcatctcaaattccttcattgacttgtaagtgctggaatttatttttcacttaagaaattcctatcttttccttgtttggtaggtatttacatgtaaataagttgtttttgaagttaatggtatttatcattaagttaataacatggttttctttctcaaatctgtttatttgacttacctttaactataacgcacacacactttattttaactggctttaaatattcatcaaggaaccacttgaagaactcattatatatgtaaggccatgtgtcagggacgttggtatgtgtcactgcttccataggacaagcgttagagtgaagaacctttccaacgggtttcaggattatgtaggacacagttgctcattgaaagtagcacactgaggatgcactcaagaaacatctcttattaagagctgataccagtcaacagcttccccatggctattgctaacagctttggtaacctgggtcttgggcaccttccttagtggctagggtgctccaggaacaaagctagtagtcagaattccagaaccctgtatacgggcccacaagatggcctccattgactcagtttaccagagttgatctcagcaccactctgtccactgtgctaacaaggctggctgtatactctttatagtcaggattttcatattcaaccataattaaagtagccagtagacttatttattttagaccaagataactttatctttctctaatttcaaaggtaatgaatcttctaaaagaggagttttaacatcttgcaaatttggtagaccttacctgtaagactccaatgtgaatttatttggaaggaaaacagtttgatttcattaatattctctagtttttgttgttgttgtttgcttcattgatttctgaccaagttttcatgactttctgttcttgactctgttctcttgggatctccctgtcgctgtgtattcaactatagtcatttaaaatcattacttccatcttgacaaacatatttaatactaaaatgtttatctgtgtgcttttgccatgtgtctttttcagacatgaccttgccctgtaagacacactgtttcttttttcagttccttttggttgattgagaaagagctgggttgacctcacactggatcctctttgccttagtctctaggctgctctgccaggattgcaagctgggattaccactttagctttcattagttcacaattctagtgatactttatttacttttaaattcagcgtctatttgttcattattcctgtaggacttaatttagctgttcttttgcttttaatgggttttattccatttcattggagaacagagtattatggctttttcttttaattgtctgctcttcactatacagtacggtatgaagcatatcctactttaaggctacaaagaagctaaaattaaaaacaacagacatgaggtgttttgaggttctgtggtaccagactgaattctttttacctacaaacaaccacagtagcaagaaccatgctagaacattctagcatacaacttgtgactcatttttggaacgtactcttgtcctaataatgtgaaacaaagctgtaggccatgaactccagcctctgagtcctgggtaagttaaacatgaacaatgatcctgtccctcagcacgtcgcgtttgccctgtcctcagttgtgaaaatgaggattcacctcactctaaaagatgaggtagagatgaggtgaacatattcagccagatgagtagcccacagaaatcctcttgtgaatcataactgtgattaccactacataaatagtgatccgtgatatgaaaaccttatcaaccatttctaaacaaaacaaaacaaaacccagataatttgaatcttaatgcttcatacacagtacaggtggaacacagggggaaaaaagtaacaattaagacattgattttaaaaatccctaaaaagccttacaaaatattaaactagaaacttaaaaaagtaccttgctagggtgcagtaaagaaggctcgggggtaagaagccctggctgtgctgctcttgcacaggacccaggctggattctcaatcacctggcagctcaaccctctgtacatttagttaaaggaggtccagcttccccaggcacaaggtacatgcatggtacatacacagaaatgtatgcaggacattcatacaaataaaagaaaaataaacacatcttaaataatttaaatgaaaacaaaaaaaaatctgtgaaacaacatcgataacaaagacccagattatgataaacggcaaacaaaaggatatatccagggtaaatgcagtagacaggatgtacacatgctgacattctaagtcttgtcaacataaagtaaatatataatacaaaaattagcaaaaatgtagaacaattcatataccagatgatttttacatttgcttatttattatttgtttgtgttatgaatatgtactactaacaaagtggttattaaacaataagtctttgcttacctttttaaaggtgaaagttataaaaatgattcataaaactccatgtaggaagccagtttgtggtatactcctgtaattccacactcaggaggcaagaacaggaagcaggaagatattaattaagttggaggctagcctgggctgcatagtgataccttgtatcaaaaaacaaaagcaaaatgaaaatcagttacatgtaaggatgcaggagcagaaccaaggggagccacgtgatgggtaaacttcactgggattctatgtagcaattaggtaattcgattagcatgtaaagtatgcacaaataccagatcctcagaaattaacttcaaaataaaattacaaagaataaaaagtggatatctgcatgagaaggttcattgaaacaagtcttacagacaaatactaagcttatgtcatcatggagtaccttgtataattttaaaaatccgttatcaagaattattgcccaagaagccaacattacatttaggaacaaaatgcaaagctccctccttttggaaaaattacacatttaaatgcatgctaacagagtcagtgcatcagaaggagagttatactagggtggtcaggattcaccccttaattttcttcccacatacaagcaaatcttacatccctacttccaaaatgtaggctgtaaccactcatttcccttaaacctaaatcaaggccccaagggtcctgacagctttgaggaaacaaaatttgaacaggggtctgaatacacggaggaaatgcaccctgcaaatacctggggaattcacactcttgttgaggaaagagcaagtacaaacctgcgaagagcttgcttgcttcgtgtggttaagaagctggggcagggatgagaggtgtgaggttcagacaaagcaattgaggggagggatttagaagacaattctggtcaaagcatggaagacagttgtgattgacaacatagcacaaggtgctgggggtgatgtaagatgaggtggtcaggaaagacctttggaggagctcagatgatgtagaaattgagagatctggaaagaacagatagggaaaaatcatttggactttaaaagactttttaaaaaattatattagatattttcttcatttacaattcaaatgctatcacaaaagtcccttataccctccccccgccttgctcccctacccactcactcccacttcttgggccctggcattcccctgtactgtggggcatataaagtttgcaagaccaaggggcctctcttcccaattatggcccgactaggccatcttctgctacctatgcatctagagacacgagctccgggggtactagttagttcatattgttgttccacctatagggttgccgacagaagaaaaaaatccctgtacttggaacatatagaaagtaaagcacagaatttaacaccaaagattgcgttgtaggagatgggtaagggatccaagagccctttgcaaagattactgtctgctctagagaacatgtgagagtggagtgtggacaggagagtggaaaggacagggagacagattaggggagcacacaccatcacagagggcagtggggctctgttttaggctgaaaaaggcaagggcttctgactgagccaccaaccagacagcatacacaggctggttcaaagcccagacgcatagatagcagaggagtgcctggtctggcctcagagagacttgaggacccagggaagtgggaggcctggccacgggtggtgtgagtgtgttggggtgggggacaccctcttagaggaaaggggaagaagaatggcatgaggaatggtgggaggggggaaccgaaagtggggggggggggcaatggatggaatgtttaaaaaaatggcaaggcagtacaaggcatgtttttaactgtagggctttagggagtacgaagcaaagaaaggactgaaggatgcatacagggctttgatggaagctattgaatgaaaaactgagtattggacagagtagtggcccagggatctgagggagaagagacaaatacattcgtgttgaatctaaataaaggctaatttatctaagtataaatctcggaagcattactgaaaggccaattttgttcttagagaaagcttcatcatgactaaagtgacctatctatgattcaactcatcaggatttatttgaccaaagatctttttttaaaaatattttttattattacgtattttcctcaattacatttagaatgctatcccaaaagtcccccataccctcccctccacttccctacccacccattcccattttttggccctggcattcccctggactggggcatataaagtttgcgtgtccaatgggcctctctttccagtgatggccgactaggccatcttttgatccatatgcagctagagtcaagagctctggggtactggttagttcataatgttgttgcacctacagggttgcagatctctttagctccttggatactttctctagctcctccattgggggtcctgtgctccatctaatagctgactgtgagcatccacttatgtgtttgctaggccccggcctagtctcacaagagacagctatatcagggttctttcagccaacgcttgctagtgtatgcaatggtgtcatcgtttggaggctaattatgggatggatccctggatatggcagtctctagatggtccatccttttgtctcagctccaaactttgtctctgtaacttcttccatgggtgattgtttccaattctaagaaggggcaattaacaaataattctcacctgaggaatactgaatggctgagaagcacctgaaaaaatgctcagcatccttaatcatcagagaaatgcaaatcaaaacaaccctgagattccatctcacaccagtcagaatggctaagatcaaaaattcaggtgacagcagatgctggtgaggatgtggagaaagaggaacactcctccattgttggtgggattgcaggcttgtacaaccactctggaaaccagtctggcggttcctcagaaaattggacatagtactaccagaggatccagcaatacttctcctgtgcatatatccagaagatgttccaactggtaagaaggacacatgttccctatgttcatagcagccttatttataatagccagaaactggaaagaacccagatgcccctcaacagaggaatggatacaaaaaaatgtggtacatttacacaatggagtactactcagctattaaaaagaatttatgaaattcctaggcaaatggatggacctggagggcatcatcctgagtgaggtaacacaatcacaaaagaactcaaatgatatgtactcactgataagtggatattagcccagaaacttagtatacccgagatattagatacaatttgcaaaacacatgaagctgaagaagaacgaagaccaaagtgtggacactttgcctcttcttagaattggaaacaatcacccatggaaggagttatattgaccaaagatcttatctttgaaaaaatgatgcatacttcatacacattattctattgatatttatgttcattctagagcatatggtaaaaaattataaatgggtaatgataaaataatcatgattaaaattactcaaacttttaattcagatttttcatctatttttattttacaaaactatgattttgttataaaattaattatagatattcttgtgaaaagatataaactaaaaataattgaaaatattttcattacttaatatgctcacttaaatggtctgcaatgtggttcttatgattgtattttaaataatttcagtgctaattgttcagaacagctaggaaagagatctcagaaaagcccaatatgcacatatgtaatagatgcacaaagcaggtttataattaattcttgtggacataatgccacatgtgcaaaaatattcataattctagtcttagtcatgtcagaaaagggataactgtacccaactgagaagcttggtttaggagtggtcctttcttcatgtgatccgcaatctccagttctcaaatttctatgtagaggtcttgcagagcgtttgtctactatgtaacaagtggttagaggataaccaactctaaagttatctttaccatatacacacgaactatctggggttcaaaccctggataattttaacatgtgaaggaggataagttgatctctgtaatcaaatcatcttcagttatgtgaaagatagtttatcatcaagaaacagataagagaaaaatttaaagttctcaatttatttaacttttgaatatgtgaaaggcatgtcttttcttgccctcttggtataatatgacttagttaaatgggtgactatatgagctgtagggagtgtcatttaggaatatatgctttaataaccagtgcagaatttgccatcttctatccttgtagattgtcaaaatggaaccccccaacagccttagttgctaagtaactaaaacaaacagagaccctgtccccatccgcctctgctgggtgtggagcacagtaagttgtatgtcttattgctgaaatttctactatcttgatgcactttagaaaatgtaaccttcaacataatctaaactttctcactgtaacaatgacacaattatatatttattatgattaggaggggagtcttttctttttgtttttgtttttggtttttttttttttttttttttgagacagggtttctttgtgtagccctggctgttctggaactcactttgtagaccaggctggcctcaaactcagaaatccgcctgcctctgcctcccgagtgctggagggaagtccttatcaattataagtaactagacattagcatatctgaatcacatatcctcagagaccttactggagtaatactgctcataccctttgtttatggagaagtgagatctccatgtagcacttaggaaacattttttctgtggcttcttgactattactctttttttaatgccatcatgctggttttcttgtagttattaaaattttgacaaaaactctgtgcatttcaacccttctaatttttaagacttagttttcattttagaaaattatttgcaaatggttgccgttttggtaactatggaggcataaaactattcatagcactacaagaaaaattattgtttctattttttgtatttttgtattatttttatgtattatctaattttcacaaaagggtagataaacttttaaaatgacaaatgttgataatgacccctcaccccctgtgctctatccagtcttatctctttgcactatgttcaattattgcctaagtttaaatcatcagaattttgttctaggattactcaaatttccaccctatttgtcttcctgattgcatccttggaagcctaaagtctgtcttccatcctgattcccgagtcatgtgtctgatatgcgcattaaaatatgtcacttctctgtaaacatcttcccatggagttccattttttttctctttcaaaatagaaacttctgtcagtaatcaagccccacattgtttctctgccccattagttaagtttctggtctgctggtctttcccccagctatgcctgtgtctttcccactgatacacaaaggtgtaagctagtctcgttaaaactttcctagaattctcttcatttttctgtgaagcttctgtaatacacaccagtttggctaaaccgcttgtcggtaagggttcctaaacacacactttcccacatcctttgtcttctgccttctgttcttgagtttttaccaaaacatttcctacatgcatccaggcttttaatttggggtcgaggggagggacttttttattagatttttcttgcagctttattggggtataatttgcattctataggacccatgttggggtatacaagtcagtggtttctttcaaggactgcacatttaagtgaccacaccaacaagctaacttgaatggttttcccaggaatccccacgagtatttccagtctgagacaagcaagggaggctatgtctgaatatttgtcttccatagacaggtcatgtataaaccatgcatgctctcctctattgcatgtggcgtttttcacttcactatcatgcttttgtggttcatccaaatcgtaaaaagtatcagtattttgtttcctttggttcctaacagtatttattgtatggaatgaaatgtgtttcccttatataagaacctcagattgctttacatttggagatattttgggtaatgttccactagtaatgcatgaagaaccatttttactttatcttcctcaaagctttatgccatttattatatcttcttgtagttttaatctgaatttcttaatgaggataatgatggtcccttcatggtgtgctgattagcaatgtattttttcttcttcttcagtaaaatgtcccttcatataatttgtcaatcttcttactgaatgttttttgttattgaattatatggttttttttacatatactaatttgcaaaagttttcaaataagaaaacatgtagatatcatctctttatgatctacctattcatttctgtcttcccttgaagaaaaagcttttaacttttaataaagttcaccttataaaaaactttttctcttttatagctcatgctggagatactaaaaagaatgagcaaaatttagtttaaaatgtgaagaatttttcttcagacaatttagatagcataagacatttattttcagtcttgagaaaggataaaaatgttgaggaaacaacacacacattttcagaagtcaaagcataatttggtctaaaaaatccattaatataaagtgcaaagtgtttcttacagcaattgttaaatgttaagaaaatggttttttactcttgagattaaaaataagtttacatagcatgttttgaatattatacctattataatatttgttgtttatgcaaaaatatgttgaaatcatggaaattatttcttaaaattgtgtctcttcatttatttcattatttcttctcctacaaaacacatgaagtgcttttggtcctaaagcatccatatgctgaaaaaaaggaaacaggtgttttttaaaacaagtttttttagtgaagtgtaaaagtacgctttaggataaaaaaattctcagagtccttgtgagaccatgagagtcagcgtgtgctcaagagctgtggtgacagtggctctgaatttgcagcctgaagagaagatgactaggcaagactcaaacttttagaaggagcgattgctgtttattagaaagatatccaagtttaacgttccaactgtggtccagatagtaagagcacttgatcatatttaatggctttttaattatacaaaagatgttgagtatctgtgtgggctcactaaggtcttaatgatggggccctgatctggtgacttaatatatccccataagaaagagataccagacgtccccgtgcttgctttctgttcttgtttctgtctctggctgtttacatatatgcattagggaacaagcacataaagtggtgtgagagggcagcagtaagtaagctgggaagagtgtcctcaccagaatctgaattagtcattaatgtactgtggacatctaattcaacagccacgaggaaagcaagtacctgttacttcactgcttgtcatagctatttcactgtaggaaagctagctgttctgattacaaacttttttgaaaactacaagaaaaaaaaagtcaagaatgcctggaatgtttaagacaaacatccattctggttgagttttactgagtggatttgaaagagatgaacatctgggagctaagagcagcattgaactggagtttgtggtctgctgggtttgaatcttgaggtcctggtaggatgtcagccaataaagaaaatgttaatagtcttttttaaaactagctgcacaggtagtggatgaaggatacagcccaaagagttggaagcctttctaaaacagaggatacaaaaaaacccctagggagccagaaatgtatttcagaagcacaagaaaggtcagagatcacaggcctggtgtgttccactctgtaccatacgagttgcaaagaacataaacatgggagatgctagtagaagaagggattataaaacaaaaagcaaaaggaaacccaaaccaaaccagacaaataaaaccaagcaccatctgtgacgagcaacagacagttcagcacattatgaatggaaagaagtaatgtaagactgtgcacagtgtgagggacacacacttggttttagcaagtggcttattgcaaagatgttatttatttaatagctgttgatttccaagtccttcatttttagtgtctatgactatagattgcctgactctcaagcacattatgcaccccagaattttagcagaacacatacatgggaaaaaaactctagcttagactttaagtaagagcgattaatatatctttacaaatgtaagttcacatagaaaaatatgaaaaaatatagaaatatatagtgaagtgtattatacatatatagtgaagtatattaaataatactttttatatgaatataatgaagtatgttagtgaatactttacatatgattttctacatacaactttaacaccaattgtctgtaggtactcatatatagatacttatttaatttagttcattcttatatttttagttattaaatccctggagatcatttgtgagataataattattattaatatgattgccattgttcaaagtcaattatctgctaatatatatccagggattaaacttagagtaaagttgattcttgttctgccccctaaagagtttcagtgaggaatcttagcatggttggcatcacatggaagtcagcagtgtcctcaggacatttcataatacactaacaggagtttgcctgttcaggtttgatggacaagtaatgcatatgacagataagaagaggctttttaatatgttgttactcattttgttacaatatgaggactttgaggtgggagaattcactctagaactggttgaataagtagattgaataacgatttttagtaaattattttatatatggatagacattttatggatttaatacgtgtattggagttaaggtggtaaaattctgactattttaccacccacatacattttactttatgtataactgagcttaatatttctctacctaaatttaatcaacaagggctatggcagtaaagttagagaaaaattgaaaattatagagtgatagatattccagttacatctacttacacttcacagattatatagatttacgcccaaagttttttttctttttactatgcattttcaacattgatattggtttatagcaaatgaaaaggaaggaaattatacagcatttaatggcacatggccttgtcaatttaaaaaaatcaagctcacgaagaccagaaagctcatatttttctctatgatcttatacttgtaaagacttattaagggctcttacttaaatcttaagatagaggtttttacccatgtgtatgcgttctgctaaaattctgggatatgtaattgtgcttgagagtcaggcaatctctagtcacaagacacaaaaaagaaagcacttagaaatcaataattattaaataaatattaatttttttctgtgggactggtatatagttgagaacatatgaatataagatagaatttgcccactttaaatgtttaattcagttttaaaacatgctgggattttatgtatatgacaatgtacaaagttctactttgtaatacatttttgaaaaacatattttttttttggtctgagtgatgtttgatttttttccctttacaaactttggaacaatttttgttttccatttgctaatactagagactttatacttttgtgcaatatgaagctatactttaatgtgattagaaatacatttaaaataagaacaaaagcacatgaaacttaaaagtctagtgtgtgtgtgtgtgtgtgtgtgtgtgtgtgtgtgtgtgtgcttgagaagaatacatttcttcctaaagtttatcttaaacaggtcttataatttaggaaaaagctctaaaggtacattacaaacaagcaaaaaagcttggagagaaataatttcaggtttttttcattccagaagctataaaagaaaattactgccagtacttttaatgttgtttacttaagtggagatgtgccaaatgtagatgttatttacatctatggtgggggtagtcgcacttaaaaatttctcacttatatgttgttaaatatcaaccttgaatgtgaaataaaatgcagccaaatggagtgctgacaactgatttctcaagcagccacatgtatgcacttaagttatgtgcatccttcatcttatgggtataagggaacagtgaggaacaagataaatacaatttcatttttattagctgctgcatttgcaaaaagccataaaatgcatgacttcgttagctctaagaactgagcaattttttcttgcaggtacaagttcctgaccaattatgtgccattgaataaaattatgaaaggacatatgaagagtcttgtctcaaaaacagtagccatgcttctgagtttgttgacactggctgaatctgtctggtctgctaaatcatgagcaagtcagtgtgtgagtgagaaagcattcacatgcccgaaggtcaaaatttcacatgttaacccaatctaatttggtgtagttccaatacatctgtaagtttaaaagctgagattttattcaaagctatgtaataaagtatagtacagctttcccaagataattatcactatttgacaatatcctctttttggtaatttttaaagaaaaataatcaattagaaattttcttagttcaattatctcctaacccatgtaattagaatttctcattcttagaaaggagagttaggaagaatatttttcttcaggctcaaagtgttgattatagtgacacagcgtttgagtcatttaggaaggagcatctgcgcaggaataatgtatcggttttaatcacagacccaagtgcctaacagcaacaacaacaaaatactgttagcatcaagaaatgtttaaggcatattcaaatagccttttttccaaaaacttttgaaatgaagttgtattagttttgaagtcattacaagaccattttgattttaaaaatgaataacatgagtgtctaaacctttaattttcttaagaacacttaaagaacaatttgtgtgttatgttttcttttctttgttgtgaatgagccttcctttagaataataatgatcctaaatcactcaaagtaactttctgattttaagagacaacatgagacttatccaggccaagtaagttatgttatctctcaatttttaccattagtgccaactgtgtgtgtgtgcgtgtatgtatgtgtgtgtgtgtgtgtgtgtatgtatgtgtgtgtatgtgtgtgtgtgtatgtgtgtgtatgtgtgtgtgtatgtgtgtgtgtgtatgtgtgtgtgtatgtgtgtgtatgtgtgtatgtgtgtgtgtgtatgtgtgtgtgtgtgtgtatgtatgtatgtgtgtgtgtatatgtgtgtgtatgtgtgtgtttatgtgtgtgtgtatgtgtgtgtgtgtgtatgtgtgtgtatgtgtatgtgtgtgtgtgtgtgtatgtgtgtgtgtgtgtgtgtgtgtatgcctgcatgctgtgaatctgttctctccttctatcttagtgtggattcaaggaataaaagacaggtttactggaactatatggcaagtgcctttaccaaacgagctaccacattagttactacatttattttctattaacaaagagaatgataaaaccattattatatacacaactgctttcagggtgagaggagtctcacactgacatgtgctattaaaaaaaaccaaacaaacaagaaggaaacatcatgatcaggcaagagtggtgaaaatatcaagggatgctttatgacaatgcatgatcaatgctatatgataatgtatagtccaattccttgattgatactgtttctgtaatttattaatttgaccacctgaattttcatattatatatctcatagaacttttttctgtacaaaaataatattttgaaaaggaaaaatttttcttttaatatatatttagcaagtcaatattttccttttaaaataatgtttagcatgttaaaattttaatatatgctttaaagttaaatgagtgttttactccactgaacatagatgaatgaaatttttgctatttagaacatttcattcattctaggaaaaagctattcactgataagttataattaaaaagaataagtaagatatatttcaaaataccagatgaaaaaaatataatttcaaaatttacagagaacataactttttgttccaaagtgccaagaattgatttgctctttcactgatattgaagtcttggtagatattgataagcctcagtccttggaagtagatggcttactgttggtcacttatgtcataaatggactggcctagtacaattcagaaaggacttatatcaaactttacaagtataaattaatttatttttaatttttgcaatcagaataagtacagtcttttagcccttgggtcagcttgatgctatgcagctgtagtctttagaaatctctgacagtaccatgcatgagcaattcttaagacctctgcagttgtatttaccctggatttcagtactactgtggttagacaacaaaattgctttgactcagccactgagatggagagtcacgtatagggcatatgatggttagttttaatagttaaagacctaaatttacctgggagataggcttgagagcaggactgtgaggaaatctcctcactgcactgagatgggcaggcctagccactctgggtggtagcatcctctagccaggatcctggactctgtaagtggaacaaggaaactgaacagcagcatacattcattgctgccttcttccagattgtgagtgcaaggtggccagttgcttcaagcttctgccttgactctcttggcacaagatactgcattttttttatcagtaggtatatatatatatgtgtgtgtgtgtgtgtgtgtgtgtgtgtgtgtgtgtgtatagtattttcttcatttacatttccaatgctatcccaaaagtcccccactccgctactcacccactcccacttcttggctctgacgttcccctgtactggggcatataaagtttgcatgaccaatgggcctctctttccactaatggccaactaggctatcttctgatacatatgcagctagagacaggaactctgggggagtattggttagttcatattgtttttccagctatagggttgaagacctctttagctccttggttactttctctagctcctccattaggggccctgtgatctatccaatagctgactgtgagcacccacttctgtgtttgctaggccccggcatagcctcacaagagacagctatatctgggtcctttcagcaaaatcttgctagtgtatgcaatagtgtcagcgtttagaggctgattataggatggatatccgggtatggcagtctctagatggtccatcctttcatctcagctccaaactttgtctctgtaactccttcaatgggtgttttattcccaattctaagaagaggcaaagtgtccacattttgtcttccttcttcttgaatttcatgtgttttgcagattgtttcttttatcttgggtatcctaagtttctgggctaatatccacttatcagtgagtacatatcacgtgagtttgtgattgggttgcctcactcaggatgatgccctccaggtccatccatttgcctacgaattttataaattcattctttttaatagctgaatagtactccaatgtgtaaatgtaccacattttctgtatccattcctctgttgagggacatctgggttctttccagcttctggctattataaataaggctgctatgaacatagggagcatgtgtccttcttaccagttggaacatcttctggatatatgcccaggaaaggtattgctggatcctctggtagtactatgtccaattttctgaggaaccgccagactgatttccagattggctttacaagcttgcaatctcaccaaccatggaggagtgttcctctttctccacatcctcaccagcatctgctgtcacctgagtttttgatcttagccattctgactggtgtgaggtggaatctcagggttgttttgatttgcatttccctgatgattaaggatgctgaacagtttttcaggggcttctcagccattcagtattcctcaggtgagaattctttgtttagctctgagccccatttttaatggggttatttgattttctggagtccaccttcttgagttctttatatatattggatattgaataacaaaaaacctaggatagcaaaaactcttctcaatgataaaagaacctctgggggaatcaccatgcccgacctaaagctgtactacagagcaattgtgattaaaaactgcatggtactggtatagcgacagacaagtagaccaatagaatagagtcgaagacccagaaatgaacccacacacctatggtcacttgatctttgacaagggagctaaaactatccagtagaaaaaagacagtattttcaacaaatggtgctggcacaactggcggttatcatgcagaagaatgcaaattgatccattcttatctccttgtattaatatcaaatctaagaggatcaaggaactccacataaaaccagagacagtggaacttaaagaggagaaagtggggaaaagcctcgaagatatgggcacaggggaaaaattcctgaatagaacagcaatggcttgtgctgtaagattgagaatcgacaaatgggacctcataaaattgcaaagcttctgtaaggcaaaagacactgtcaataagacaaaaaggccaccaacagattgggaaaggatctttacctatcctaaatgagataggagactgcagtttttgagctgagtgccagaatatatacctttttctttaagttgctttcgtcagggtattttgctacagcaataggaaagtaactaagccagagccaatactgattccctaaacaatctttttccagttctttgtaggaagtagattgcttatgttctatctggagtcggtcaacacattttaaataccgttcatttgacccttggagcaggcatccatccaggaatcgtcaccctaatgaacaaaatctttgttagtataagataaatatagctgacatttctggtagcttgggagctatgcttcagatttttcaaatttagcagccctaccatgcatttatgtttctaattagcacacttcaaatgttaaacagtatttccctcatcctttgctcagatataaaacttttgaatctatatatctcattgtctatgccagaatatgttaagcaaattacatagttatgataagcataaacatttatctgtacatgtctttcgggaacttcattattactcttaatgaagaaaatcgaggccttgggttagttgctcttgtctgtttgatttcactttcatagatttaactcttatctaaatctttatgctattccagactgatacatagtattaccatacccctttacttttttgtgatgtaaaacagtgtttacaaaatgaactaatgtacaatttactaagtcctatgtcatatggatggagaagagagggaacagagagtctttcagagtaacaaattaattaacactgcaggtcatacttggggatctgaagagggacttcagcactgccaaacaaagcagagaatctgtctaaaaagtttcccaagaaaaagaaaggagccacagtaagatgcagcaggcttggctaatatagggcctatgctatgtgcctgtagtgaggttgcatcttcttgatgcacggaggcagagggatccggttcattatgagatcaatgggtggccctcagctctccacaggaacatttggaggccagagagaccttagcagtgtgactgtgtttatgaggactttgggcacagcacctgagtggtcttgaaattttagagtcttggttcggggaggggagggttgatctgggaggagggtaagaaagttgagagagctgagtatggccaagtggtgttctactccatgtctgaaaaggttgatgaataaattaataaacttatgggatgtacacttacatattatacttttagactgtgtgaatattggaaaacagcccaagactttatattaaaaaataatccctcttctgtttctaatgcatcctgcctgcagagctagataggatgatctgctgaaagatagccatttttctttgaggcatacattgcagatgtgtttgttgcctctttcccaatccttccttcccaatgaatcttagaaccttctgttttgttagtatcctaaagtgccagcctacacatttctttgtatttggttttctgctttttgtcagtaggttcttttacatatgcccgtatcaccctgcaaagcatctcatttgctcctgatgtctcttgccactctgaaaagagatggctcttctaaaagatttctcaggaaaataatgcatcataaccaaccttacaaatctacttctgatgggttctttccaaccttaagcattttagttagaacatcatttgcaactgtcagtggatatcagacaatcctaggtgggagggtggcatatgtattttgggagtcacatattccagtgcattcataggtgaaggctagatatctgtgtcagggtatcttctatcattctccattttacttccattgggggtgatgtgttttgtaaaaccaagaatatgttttgtagagtgtagtatggtagggtgaaaggaggtacctcaatggacccatgctaagacatccttccccactgagggaccaggcatacgactggtatagaatagaatagactttattttgtggcatgggaagcagagttgagaagggagtagaggcagcgaaatagagaaggagcagaatggggagagggaggaggagcagaaggaggagggagagggagaaaggtgtcagagagagcgaagagaggccaaacagtcctctttatagtaagcctggcctatctgaatgttgcaagaataactgttggtcaggacctaggaggaatgctaacaggaggaatttttaataggaataggactgagcaaatcacctatcacatattgagcagggtaggtacgtaaagttgttggaagagttgattcaccttacctaaatggtagaattgtgtaagtcagttgtatataaactttgttcatttatagttacgataacacggtctcatttcatcctccccttctgtgatgagctcttcttcaccttttttgttgcagttttctatcttttatttacttcagtgattcttttttctattgtttattttcaaatgtcctcaagctaggggcttactgctctgaggccttgaacttctaaaataagtcaccagtgctaaagccttcgcttttaactcagttgtgtcgcacaaggtttgacatacggtatttccattggcattgatttcagtacatcacttggctgtatgttgtctggtttttaagtgtaaagggaatttcctattacctttttgtaatttggtttaatttgtcatcatagactattctgacacaattcttttaagcttttgatgaatctttttaaattgtaagtttattttattgtattttatgggcactctgtctatctgtatgcctgatcaccacttgcatgtcctgtgcctgtggagtccagaaaagagcatcagatcccttgaactggagtcacagaccctgatcctctggaagagcaaccaatgctctcaactgatgagccatctcttcactatccccacacccatgcctttttcgtaagacacagtttattccactgtggttttgtgagcagttgaacactgcatttttctgtcattaggcaaagggttatttctgtggacattggattctgtagttgacagcattgctgagtaactctgtgattcaactgataacctgtctagcactttgatcggttgttgagaggggttgatgtagtttccaggtgcagccgtgacttctgttttctcctctcagttatcacggggagtttttggcctctgtggtttggtaagtacattccgagcaccataatatctccttagtaaaacgactcacttaccatcctgttctttttattcctttgtctgtattagatatttctgctgcaaagtttactttaacatatataaatttctactttctttgagaaatgtttgtttggcatatcttttccaagacttcttttttgaattttttggtactattatagttggagcaagcttcctgggacaccttagggagagataacagatgggacccctggtacttcacaaacactaccctaggatctttagagtacagtatttttggtctatgaaagcctgtacttgcactgtttggtacatagatgctttgctgacaaaattcctgctttttcaccagacatcaccccagtggagggaggaggaatagttgaatgctttatggtgggaatgagagtccaagatctcattgtggttttcacacagggttgtggaaattagtagtgccttagtaagatggaagtcccagtgctgaactttactctttctgatacaatctgagcaaacctcaggagtgagacagtgtgcaggtcttgaattagaaggtacccagcgtatctactcctctttgttgatgtatgaaacacagccagttttctatgacatttggctgcagtaagtagtatggccattgtatacttattgcttcctaatctttcagctagagccaagagacttttcataaggattttgttttgtttagagacagctattgttatgttgccaagatcagacccccatcattttattaatacttaactaagggtgtacttatactcaaggttttctaactcagtatattgaggactaagattgtataagcaaatgaaacttgaacatatttcaactgtacccatttggcatttctagattatataagcatgtgaagtttgaacatattttagttgtacccatttggcatttctaggttgttagcttttttggcttcagctctggaatatctgaggaaagtaaaatgtaatgaatgtctatcttttcagaggcagaaacatttttataagatttttgtagcaaatgtaagatttatatgtctggaattcaatagtcacgtaagtttatgcactaacacctgacaaatgctaagagaggcttctctgaccaaagcagagagcagcaataatgtatgtgtaaaagcacaaatattgaaaaagaaatatggcatcatgtgcctttagcaaatcagcagtcctaggttccatctaggacctattaactgcctagtcatgggcttttgactaggttgacaggatgagtcatgaattctttccagtgaagagggcatcagagccaatcaatcaaaaagtgattggttaccccataatggtcacagcaccattatacccatgagtgtttcatgcctggcaggtggttacttaactcataagattcatatctagatcagattgacgacaacttttctcacccaggaactttcctagcacctttgggccctgtgaaagccagccagtaaggtggaagtatgaagttcaggtccagcctgagttctctatgtcctggaactgtgtgtgccattagtgacagcgtctcaccatctagttcttgtgggcagtcaagaacaatggtagtatctcagactgtttgggagacctctaggaccttcagatccttgaccaacaagtcgcctcttgccttgggatttttatttgataactcatgggttctgtaaacaccattatccctctgtctttgtgccaccattgcactagcataccttgcaggtaggacactattattaactgaaaggtttgcagcagagttgagtttatcattttcctttggtagagtgcaaaggaaaaaaaagtcctctactaagaatctactagttcttagggggtgaaggctctaggatggcaccagctcaacttgtctgtgttctcaatgagttgtgtaggtactgtcttcagctgacagtttgtggagagcaaccttggtaacagcacaagttgtttggagattcccataacattcctttggacagcaactcaattagaaaaacccatttaccatactggaagtttcatttggtgacaagaaatttccatttgggccttatttgggggtatcatttagatttccttcatatatgcatatattaggaagtgtctactaaatcagggtcccattcaaatgaccctcaattttagctgttttcaccatgtttttctcctctgtcctcttccagtttgattcagctgtcccttgtttatccatagagtttttttttttccatttttatggagctctccatttctcctcttactcaatccctaacctttgtgcttctctaaattgtagcatttttatcactgacttaacaatgttcatcttgcctaagaaagtcacagccactacaacagtttgatattatgctggattattcactttcattattatatgaaacaaacttaagcataattaataatatttactaagccccaaataagtgctgaatgagttctatgcattacggttatcatttgactctcaaaacaagtgtttgttataatactatttttctcatataatgtaaagaaaaccaagacactaactgcatttaacaggtgaaaaattcacctgagatcaataatagcataggtattgtcttcacccaacagtttgtggagagaaacctctaggctggcaacaaacagccccagttgtttggggattcccaaatggagattctatatttgaacctggctgagagtaggcaccctgctagtccttatttcctctttccttcccttcttttctctcttctttccttcctttttgtacaagggattaaacctccatccttatacatagtgaacacaattcctatgaaacccacaaccccatgagaagacattcttacctatgaaattattctacttaagctcaagacagcatgaaaaaagtcccttctggttggtctctgtgtccctgtttctctgttatttttctcagtgggtatggtcatccattctaaaagctcattctgtactcttacacttagcagtggacttcctgtctttagtattttaaataaaatacacatctgtctttccatatggcaatgcaaaattttatagatgcagtgtggtttaatttacataatgaaatacttaaatacatttctgcatttttggctgaccaactgtcttctgccctctaactctaccaccctgtctacagcactttcagataaaggcaatattacactgttctctggaaggttaattgtagccacttcattgaatgttggacattgagtggtaaaggggttcaatgcgtgaagtgtctctgcatgctgttgaaataaaagaaatatttaatttcttccttgtttatttcttctagcttaaatgtagatgttgtaatgggaactttggggtcattttagaatctgtaagagggagaagagacaagacagcaaataagaaacagttggtcttataaagatgccacataaacatatgcttcttcttcccactgatttgttacctctgagagtgtaatagattttcttatttgggtccagcaagattgtttagtttgtaaaaacgtgcaccacttgacttgattgatgtcaaggattgaaggaaggaactaactcccacaaattacactcacattgtcaacatggaatatttatgtccagtatacatacatacatatacacaggacaaaattaataaacatacaataaaaagttcgtgtttaaggagctgttcttttggatttgttttatcagttgaatgaacagttgtagagtaggtttgataatcagtgcttctatccatcattttctatcccataggtattaggacaaaaaaattgcttggctaaacactgcaatcaaatcacttattggctcagagttttatcaagaatgacagtgtttattcagctatttttttcctggaaaaagaaagaaattatcagaaagcagtgatcatagctcactttctatacacagaaaactactttctccccttctacccccacccttggatactaacaaacaaaacaaaggtaaaagaaaaaaaaattagttgcagctaaagtctacctggtatcaatgtcttctagttttgttattttatttttaaattttcacattctatgacactcaaacacacatatacaacctcctgaaaatatgcctctcaaagtacaggcagccaactctgccctatagaaaaaaaaatccccaaaccaggctacaggatcccactaatacatgactttgccccaaatttgggccatagattcccatcaaaacaggctaccctggaaagctccacccacaggaaaccctacataaagcctgcatcgtgctcagttctttgatacttcttacccaagcagaggcagccatcctctgtgtctttcccaataaatatattacgtgatgtttgttgtgcagcataactatgtggtattccttagctccctattgccagaatacagttcctttcagagacgcaccacttgctctgggaaccctttccccgcagagctttaacactgacagagtcatttagtgttgtgcctgggtacatccttagggatgaccatttaggatggaataacctaccaaggagctattttctagagaagattgattctccctctctcagcagtccctgattctctgtaggtcttcatctaggtcttgggcatgcgaaactttccttatcaatgatggtatgctcaccaatgtcatcactctgcaggtattgtttaagcaaccacattgttgggatttaataagtgtagcttccctgttatgtagagaagacactataagcaggtatccttgtactctggctcttacaatcattcttcttcctcttacataatgtttatgagcattaactgtaaagactgtaacataggtgtaccacctgaggctaggcatagcacagtcacttatgttctgcactttgaacaggtattgatatctgtaatagttctcatctgctacacgatgaaggatgtttggtgaagactgaggtcttaacttattgtggatatagtgataagaaattataatatagttagaagttatattagcttaggaaaatagcaatagtagattctccacgcctttaatcccagcacttgggaagcagaggcaggcagatttctaagttcaaggccagcctggtctacaaagtgagttccaggagagccagggctatacagaaaaaccctgtctcgaaaaaccaaaaaaaaaaaaaagtttaaaggggaaggagggaagcaaatggcttagtaggcaaagttatcagctaacctttaagcaaattggtgctgagaaaggtaagtgtggtggtgtatgggtggtgaacaggataatttcagaatattgagataacagaatatgagtattataatcaaacgtttttgcttattggtagcattcttcagtgtcagtcacaaaaaccacagtgaggtaatatgtagggaccggaagggctatccagtggtcagctctgacccaactcattctaaacataacttttcatgttgacctttgatttgatgggtcctacagaaagctttgtggaatcttttaagattagcaaaccttataaaattcagaaagtcagaaacctcataacattcagaacacacagaacaaaacagggtatattgtcagtatgtccttaagtcaagtcacttctctgtgtcagagactggcagctatgttacagcagcaatataaaatagctagcaggcatggaacaatattgctacaactattctgagggtgtgtgtgtgtgtgtgtgtgtgtgtgtgtgtgtgtgtgtgtgacagaccataccttcatgaggtttgtccatgatcattatggaaggaggcaaacagtgtatggtgctagagcagtaactgagagctttatatcctgagactcaggcagaggagacagacagaaacagagtgaccgagagacagacacagagagaaagactggacttagtgtaagctgttaaaaacttgaaacccgctccttacgacacacttcctccaacacagccacatctaattcttcccaagctataattgattttaatttttctgatgtagtgatgagatgagagctgtactcaagttgtacagatacatgacttgggccaagcccagagcatttccttctctgctctaactattccaaggcctaggcctggaagcttcttgcctatacacagtctaattttccaagctgactgattcaatctagactctctcagcttctgactgaatcgctctgcctggcctcatattaacttcgtgaatacattttactcttctggctccttctcattctcttgctcattctgtctttacctgtgtctatcttgttctctctgtaacctgtctctgtaaaactgtccccgttaaaactgacaaaccaacctccctctgctcttaagtcgcctctttcctgtgctgttctcatatgagttgggcctatcttatcagtgactcagtctgtgaaatctttccctgatttgtcacattgtctgcccctccattagacatcattttaaacattggtgcttccctctaaaatgaagcatatctttattgtttgggattaaaggtgtctactaatggtgtgtctatattctagccagattattctgtaattaagggcttatctgcattccagccagatcacacagaccttggtctttgtatgtgactccttgccggaacaaccatgttgctggattaaaattcctctaaaccaagcattttgactccccagtgtctaagcacacaaatatagtttataagagctattctcgctcaagctaccatggttagattactgatttctcttcctaggcaacttgcgcactatcttctgaaaccatcagatacagtcctcagggagtaggtttccagatcagtcccagttcgcttccttcatgttctgtgtttaaattatgtgatttcttaattaataggatattaccctcaagttttaggaggaaattgtggacaatggcaaaattttatattgtttttgaagtctcttagactcccctgaccaactaaattgaagtgagggttattttgcttcccactgcaattctgttagacagtcatgctatgtagtgtaattccattaaatatacatatacatgtgtgtttatccattatatataacaattctatagattctttaatagtaccaaagagtcaattggtgtttcactttctttatataaatttcttgcttttattcttaaattatatttttatgtgtatgggtgtttttgcctccatgtatgtctgtgaatcacctgtgccctggtgctcacgaaatccaaaataaaggtttttagatcctctgtaactgaagttatagacttttgtgagttaccaggaattgaaactgagtcttctgcaagagcagccattactcctaattgttgtatcatctctccaaatccccaattctttgccttaaagaacaataaaaaagtccacaaacatatattgtatgtatgttttaagtatgattattaaataatccattttcctatggccttttaaagtttccttagcattatttatcttttttccttcttccttctcctgcatcaagaaccttcccccttccttatattaatgtttccctttgttttctactttgactttttccttgtacatttgtgtgcttccatttccagctttcaatgatgttaaggtttttgtttgttttttttaatagattctttgttcttgtttctatcatctatctatctatctatctatctatctatctgtctgtctgtctgtctgtctgtctgtctgtctatctatctatctgtctatctatcgcattggactttatattcagaattagaaggtattagctcttccttgatagaaactttaataagagtaaatactgacaattcctccatatttaacctatctgctcaatttggtatgagtttttccttattattaaaaaaatttgatagaatatggagaaagaaggatctcttacgaaagggcaatttaccatttagtatatgatttaaaatgttgatgtatgtttttcagccaggtgttgcagcctagcccttaattccagctacaattgaagttatagcaaacaaacaaacaaaccaaccaaaccaaaccaaaacaacaacaacaacaacaacaacacactgtaacttcaaaagtaacctgaacagaatagtgggactctgtctcataaaaacgcatttttaatttctaacaaattttaacatcaagtttaaaaagcgtttaaaatatcattgtctttctgggagtctgttgtgaatgactagtccttttgaaaaccaaacccaaacattccataactggcattagatcgataaagcaatagttttcatgaagttaaaaacatcattctaacatacacataaaatgtgtgcctggagaagtttaactaatgagagagcgagtgagatgctaaagccagctcagcattgaggttgtagcaggtgttactctcagcactgagccacaacttcccaatttatcggggaaagataaattctaggacattcttcttcatgacctaggttttacttctcacataagaaacggcttgtaatacaaaaactttgatctccaaaccattgttttgtttttgtttttcctgatgtgatacaaagaactgactttgaaagtaaaaactggtacattatatttggttttctttctcattgtaattgagaaattgttttccaatgttctttttagccttgtaagaaatccctttatgtacatattgctaaaccataccatgtagtaatcatacagtttttattcttatgttcacatataaagattttggtaattgtaaaaaatattcctttttctttcaaaaactatgttttcacgattattattttctaacattcagaaaatttgagtttcacaaccaaagaatgacaaaaacttctcttacctttcccgagtgtataagcctcatgcatcaacagtagaatgtctgtagaacagtcaaccttcctagtgctgtgaccctttaatgcagtttctcatgttgtggtgaacctccaaccataaaattattttcattgctcctatataactaattttgctactgttgtgagttgtaatgtaactgtctgatatgcaggatatctgaattacaacccctgtgaaaaggatcaatccatcaacaacagggttatgacccacaggttgagaacccctgaagtagagcaagcatttgatgagatattgaattcctaacttactaggtggttttcagttattctactgtcttttactataggaattttgctgtctgtttatatattagttacatttttccttgccacccgtccaaaggcagttttatggaggaaagctttattttaggggaatacatgggaaggcaaggcaacagtggcgactttgggtgcccagttagctttctcgatataaaaacaaattcccctgggaccagcctcacttgatagtgctccctacattcatggagagtctttccttctcaggtatgaatttctgaaaatgccatcaaaaatataccaagaattgtgtctcctaaacaattccagattctccaagtggacaatgaaagttaaccatctcagcttgcaaagaaaactatggctgacttgagatggtcaaacattcttaacatgtcttttgaacttcctttcttgatccttaggcacacatatttctgaaatgcaagatgccacaatattttacaactcaaagggagccttcatatttataaaagacatggtgccattcagagccaccaaactgaacaatcgccaatgggtttgacaactttccttttgagactagacaatggatggttgtcttgtttaaaggtttcaaagtctctacactgaagagttaacatcattgttttctatataatcttaagggctaaaagattttatgtgtctatcctgtaggaacataagtgattcttaataaaatgaaaaatattttagcagtgaaaattaccaagtcatctttaattaatacctgtttaagtctttaaaacaaatggaatttttcagaacatatccagagatagttcaaactatcactcatgagagctgctgtgtagagtcagtcatggcagtccataacatgaggttgtgtctgagttccaggctcacacaagagatgtaaagattcaacagattttttaggttcaatttcattctatagggaactttaggctatataaatttgtaatcattataaaggtagatttttatgccttagtgtagacaccttccctcaaataaatgaactgtgggtgactgtactcctttgctgcctttcttctgttaaagagtttgctaacaaattagctcaaggataaaatgtttagaagtaaataacattcaaacggggttaaaggaagcagcttaagtgagagaacaagagtgtctggagataaattatccttgtaagccagctttaaatgatggagggtccccaggaactttatgtggaagttgattattaagtcatatccgagtccattggaaatgtgtttgaaactgatagaatatactacagatgtttgtcatcttgctcatagagaatgctggccaaggctaagctcttcagctaaaactcacaaaattcatgtagggatttaacatgctcatggctaggtagatacagtaactcatagcatcccaggtccactgtgcccaagcacttgtccagttcaactcagaagagaataatgtaggaattagaatcttactataacagtttgcagttagaactattactgttaaattgattagagtgtgtacccaagtgctggtaccatcaatagagtaaagtagttaagtttaacaataccaataaactctctgtgtatgagacatttttgtttacccttgaaccacttgaggctacttctgcatctgtttggctgtggtcatatgtttcaatgtaatactcattaaatgcttctgcgtagtgatgaccttatttgttttgttattctagtacgcagtacactgatattttgataagtttacgagtaaaatgaatgatcaaatattaaggaaaaaacacaaaatactaaattctattatttagtacaatgaaactggccttcaaaatgctggtaaaaatttttaaaaactttactcttgatttctatacaataattcaaagtgtaataggtaattaagtactttattaatgataacaactttagggaaatctataacatggtaaagctttacttatataaagctttttatagtgcacctgaggccctggatagtcagcccagccattatattcccattcattaagtgggaagtaaagaacagctttacaactttaggtacatagtagctttacttaatgtctcagttataaaacatacgcaggcttttaaaagtaaaaacattcatttgatatcaaatccttactaaaaaaaaacaataaaccaactcctaacaattttattattatttttcatgtcatcctgttgcttgacatttggataaaaggtagggatatttgatcaacaatagtatgaggagatgaagaagaactatgtgtctgtcccattatcatagactaggaaaggctttggagctgcataggagaaatgttcatttcatacaaggataccagccccttaccgcatccttttgctctggcaatcattgacaccaaactcttaaagattacatcagtaataatgagtatgtgcagaacattatagcacaatattaaaaactaggttaaactaatcgacgttggcatttaagacactgaattatttctcctcaagaataaaatcctaggaagcaacaattacttttccttaatatctcttaacatcaatggtctcaactcgccaataaaaagacatagactaacaaactggctacacaaacaagacccaacattttgctgcttacaggaaactcatctcagagaaaaagatagacactacctcagaatgaaaggctggaaaacaattttccaagcaaatggtatgaagaaacaagcaggagtagccatcctaatatctgataagattgacttccaacccaaagtcatcaaaaaagacaaggagggacacttcattctcatcaaaggtaaaatcctccaagaggaactctcaattctgaatatctatgctccaaatacaagagcagccacattcactaaagaaactttagtaaagctcaaagcacacattgcacctcacacaataatagtgggagacttcaacacaccactttcaccaatggacagatcatggaaacagaaactaaacagggacacactgaaactaacagaagtgatgaaacaaatggatctgacagatatctacagaacattttatcctaaaacaaaaggatataccttcttctcagcacctcatggtaccttctccaaaattgaccacataataggtcacaaatcaggcctcaacagattcaaaaatattgaaattgtcccatgtatcctatcagatcaccatgcactaaggctgatcttcaataacaaaataaataacagaaagccaacattcacatggaaactgaacaacactcttctcaatgataccttggtcaaggaaggaataaagaaagaaattaaagactttttagagtttaatgaaaatgaagccacaacgtacccaaacctttgggacacaatgaaagcatttctaagagggaaactcatagctctgagtgccttcaagaaaaaacgggagagagcacatactagcagcttgacaacacatctaaaagctctagaaaaaaaggaagcaaattcacccaagaggagtagacggcaggaaataatcaaactcaggggtgaaatcaaccaagtggaaacaagaagaactattcaaagaattaaccaaacgaggagttggttctttgagaaaatcaacaagatagataaacccttagctacactcactaaagggcacagggacaaaatcctaattaacaaaatcagaaatgaaaagggagacataacaacagatcctgaagaaatccaaaacaccatcagatccttctacaaaaggctatactcaacaaaactggaaaacctggacgaaatggacaaatttctggacagataccaggtaccaaagttgaatcaggatcaagttgaccttctaaacagtcccatatcccctaaagaaatagaagcagttattaatagtctcccagccaaaaaaagcccaggaccagacgggtttagtgcagagttctatcagaccttcaaagaagatctaactccagttctgcacaaactttttcacaagatagaagtagaaggtattctacccaactcattttatgaagccactattactctgatacctaaaccacagaaagatccaacaaagatagagaacttcagaccaatttctcttatgaacatcgatgcaaaaattcttaataaaattctcgctaaccgaatccaagaacacattaaagcaatcatccatcctgaccaagtaggttttattccagggatgcagggatggtttaatatacgaaaatccatcaatgtaatccattatataaacaaactcaaagacaaaaaccacatgatcatctcgttagatgcagaaaaagcatttgacaagatccaacacccattcatgataaaagttctggaaagatcaggaattcaaggccaatacctaaacatgataaaagcaatctacagcaaaccagtagccaacatcaaagtaaatggagagaagctggaagcaatcccactaaaatcagggactagacaaggctgcccactttctccctaccttttcaacatagtacttgaagtattagccagagcaattcgacaacaaaaggagatcaaggggatacaaattggaaaagaggaagtcaaaatatcactttttgcagatgatatgatagtatatataagtgaccctaaaaattccaacagagaactcctaaacctgataaacagcttcagtgaagtagctggatataaaattaactcaaacaagtcaatggcctttctctacacaaagaataaacaggctgagaaagaaattagggaaacaacacccttctcaatagccacaaataatataaaatatctcggtgtgactctaacgaaggaagtgaaagatctgtatgataaaaacttcaagtccctgaagaaagaaattaaagaagatctcagaagatggaaagatctcccatgctcatggattggcaggaccaacattgtaaaaatggcnnnnnnnnnnnnnnnnnnnnnnnnnnnnnnnnnnnnnnnnnnnnnnnnnnnnnnnnnnnnnnnnnnnnnnnnnnnnnnnnnnnnnnnnnnnnnnnnnnnnnnnnnnnnnnnnnnnnnnnnnnnnnnnnnnnnnnnnnnnnnnnnnnnnnnnnnnnnnnnnnnnnnnnnnnnnnnnnnnnnnnnnnnnnnnnnnnnnnnnnnnnnnnnnnnnnnnnnnnnnnnnnnnnnnnnnnnnnnnnnnnnnnnnnnnnnnnnnnnnnnnnnnnnnnnnnnnnnnnnnnnnnnnnnnnnnnnnnnnnnnnnnnnnnnnnnnnnnnnnnnnnnnnnnnnnnnnnnnnnnnnnnnnnnnnnnnnnnnnnnnnnnnnnnnnnnnnnnnnnnnnnnnnnnnnnnnnnnnnnnnnnnnnnnnnnnnnnnnnnnnnnnnnnnnnnnnnnnnnnnnnnnnnnnnnnnnnnnnnnnnnnnnnnnnnnnnnnnnnnnnnnnnnnnnnnnnnnnnnnnnnnnnnnnnnnnnnnnnnnnnnnnnnnnnnnnnnnnnnnnnnnnnnnnnnnnnnnnnnnnnnnnnnnnnnnnnnnnnnnnnnnnnnnnnnnnnnnnnnnnnnnnnnnnnnnnnnnnnnnnnnnnnnnnnnnnnnnnnnnnnnnnnnnnnnnnnnnnnnnnnnnnnnnnnnnnnnnnnnnnnnnnnnnnnnnnnnnnnnnnnnnnnnnnnnnnnnnnnnnnnnnnnnnnnnnnnnnnnnnnnnnnnnnnnnnnnnnnnnnnnnnnnnnnnnnnnnnnnnnnnnnnnnnnnnnnnnnnnnnnnnnnnnnnnnnnnnnnnnnnnnnnnnnnnnnnnnnnnnnnnnnnnnnnnnnnnnnnnnnnnnnnnnnnnnnnnnnnnnnnnnnnnnnnnnnnnnnnnnnnnnnnnnnnnnnnnnnnnnnnnnnnnnnnnnnnnnnnnnnnnnnnnnnnnnnnnnnnnnnnnnnnnnnnnnnnnnnnnnnnnnnnnnnnnnnnnnnnnnnnnnnnnnnnnnnnnnnnnnnnnnnnnnnnnnnnnnnnnnnnnnnnnnnnnnnnnnnnnnnnnnnnnnnnnnnnnnnnnnnnnnnnnnnnnnnnnnnnnnnnnnnnnnnnnnnnnnnnnnnnnnnnnnnnnnnnnnnnnnnnnnnnnnnnnnnnnnnnnnnnnnnnnnnnnnnnnnnnnnnnnnnnnnnnnnnnnnnnnnnnnnnnnnnnnnnnnnnnnnnnnnnnnnnnnnnnnnnnnnnnnnnnnnnnnnnnnnnnnnnnnnnnnnnnnnnnnnnnnnnnnnnnnnnnnnnnnnnnnnnnnnnnnnnnnnnnnnnnnnnnnnnnnnnnnnnnnnnnnnnnnnnnnnnnnnnnnnnnnnnnnnnnnnnnnnnnnnnnnnnnnnnnnnnnnnnnnnnnnnnnnnnnnnnnnnnnnnnnnnnnnnnnnnnnnnnnnnnnnnnnnnnnnnnnnnnnnnnnnnnnnnnnnnnnnnnnnnnnnnnnnnnnnnnnnnnnnnnnnnnnnnnnnnnnnnnnnnnnnnnnnnnnnnnnnnnnnnnnnnnnnnnnnnnnnnnnnnnnnnnnnnnnnnnnnnnnnnnnnnnnnnnnnnnnnnnnnnnnnnnnnnnnnnnnnnnnnnnnnnnnnnnnnnnnnnnnnnnnnnnnnnnnnnnnnnnnnnnnnnnnnnnnnnnnnnnnnnnnnnnnnnnnnnnnnnnnnnnnnnnnnnnnnnnnnnaaaaaaaaaaaaaaaaaaaaaaaaaaaaaaaaaagaataaaatccttatgattgaatttttatcactcagagtagttgtaaagtacagctcttctctctctctctcttttattcaaaatagacttttttctcatctaatatattccaaccacattatcccctttcttgtgccatcccagctcctatccccaacttccctctccccaagatcctttccctatataattcccttcagaaaagagcaggtctataagaggcaacactgaaacaggacaaagcaagatacaagacaaggtaaaagcccctttatggcggctaattaaggcaacccactaggaagaaagggtcccaagagcagaataaagagtcagagacacatattttaatttcctttttcttctttctctctgtctctctctctctctccctccctccctctctctctctctctctctctctctccattgtttcagttctttccaatctataaggactttcattgattttgtttgttcagattttattttatttgaaatacagtatcagtatgtagccttggctggcctggaacttgttatgttaccagggacctttcctgcccttcaaaggtactgagaagtgacacagcaaaggatgaaggccaaaggctgatgatctctggtctttataactctcgcttactgttctgggggcccaagctgatggcctctggaaatttaactttctcctgctattctgtgactaaaagccactgacttctggcaattaactcctgcttataagatgcaggggattaaggaaagaagctaattacctgagtgttgggaattggatttaatgctttgtcttattttggatcccaaaaagccatgcttccttacctgagggtccctgcccccagctggcttcaatggataataaagaactgtcaatcagccattggctgggcaacgatacatgactcagagagaaaaggatcagatttaagagctgcaggagagaaaccatccagcaatgtaggtgggaagggaatgcagacctatggggagaggctccccagaaggtaatgggtagcagacatgaaatatagagtttggaaggtgttaagccaggaatactggagggaaatgtatgctagtcaaggggagaattagaaatgctgagccatacacattccaagtcatataaaaattaatcctgcatgtgtgtgtctttcatttgtgaatccagagggctcttgtaggtggctggcagcgtgacctgccggaagcataaaacaagtttaactagttcatcactacacttgggatcttttttctctagatctagggtcccttgatggccaggcaagaggcttggagttagttaactacagagagaaaagaaaaggaaaaagaaagaacagaggcacacatactggataaagttgaagaaagccacagcatcattttattgcggttcttagtttttatagtttctcaggataattaaattaattacatggctttctaagcattttacatgccataagttcatataagtttaaagcaataactcatgccttaaataaaatttaaggacttataacagaattgtttatatgtctttccattaagagtaatatttcactaaacattatttgttactatcccccattagttcttcatcagtttcaagcaataattttcatgtcacatgttggcctagttttttcagaagacaaatcatttacattatgtcttattagttttgaagttttgcatagataagctagtcaatattttattttctgtccttgtacctaaaataaattgtccattaccagtttatgatctttagttaccagatactgatctcacacctaacctagaaggaatgtttactttgcttgtaaatttgtttcaagtctgctttctttccctagtgaaattagcccatgacacaggaagatttacaaagctatatttacagcttttattttatagggggcatgaaattacctgtataaatttaggaattctataaaatcattatcagaaattataaaatcatccatttatctatacaacattactacatgagaatatatcttcatgttgatctgcagaagatctgcccaagagagcaggctaaatgccctggaatgattaggctgtgtaatagtggcatgaaaggcatatcagcttaataaagcagtcctgggattaagttactaaggaccctgcaactcagaactcacccatcatagtccatgcaaaatggtccagaaaattcacttgtatgctttagcctttcctcgatggctttggacactatatagaacagagtggcctctcagcctcctgagtgctgagagtaaaggtgtataccaccacacctagccccaaatacagattttcaaagcctcacctacatacactgcaatgtctttcatactctcatttttaggcttgacttcttagatattttaattcctaattaacgagaagaagcctatcttcttcacatccatagagatcttcctcagattcttttgagtacagccatcattaattttactactcttttgattgacatgttgggatgagcaaagcaggaacctgaaagatcagttctcataaacaatcagggtcttctaaaaattccaccagagaactcctaagcctgataaacagcttcaatgaagtagccggatatagaattaactcaaacaagtcaatggcctttctgtacacaaaggataaacaggctgagatagaaattagggaaacaacacccttctcaataattacaaataatataaaataccttggtgtgactctaactaaggaagtgaaagatctgtatgataagaacttcaagtctctgaagaaagaaattaaagaagatctcagaagatggaaagatctcccatgctcatggattggcaggatcaatatagtaaaaatggctatcttgccaaaagcaatctatagattcaatgcaatccccatcaaaattccaactcaattcttcaatgaattagaaagggcaatcggcagattcatctggaataacaaaaaacctaggatagcaaaaactcttctcaaggataaaagaacctctggtggaatcaccatgcccaagctaaagctgtactacagagcaattgtgataaaaactgcatggtactggtatagtgacagacaagtagaccaatggaacagaattgaagacccagagatgaacccacacacctatggtcacttgatctttgacaagggagctaaaagcatccagtggaaaaaagacagtgttttcaacaaatggtgctggcacaactggcagttatcatgtagaagattgcgaattgatccattcctatctccttgtattaaggtcaaatctaagtggattaaggaacgccacataaaaccagagacactgaaacttatagaggagaaagtagggaaaagcctcgaagatatgggtacaggggaaaaattcctgaatagaacagcaatggcttgtgctgtaagatcgagaatccataaatgggacctcataaaattgcaaagattctgcaaggcaaaagacactgtcaataagacaaaaagaccaccaacagattgggaaaggatctttacctatcccaaatcggataggggactaatatccaatatatataaagaactcaagaaggtagactccagaaaatcaaataaccccattaaaaatggggctcagagctgaacaaagaattctcacctgaggaataccgaatggcagagaagcacctgaaaaaatgttcaacatccttaatcatcagggaaatgcaaatcaaaacaaccctgagattccacctcacaccagtcaaaatggctaagataaaaaattcaggtgacagcagatgctggcgagcatgtggagaaagaggaacactcctccattgttggtgagattgcaagcttgtacaaccactctggaaatcagtctggtgactcctcagaaaattggacatagtactactggaggatcccgcaacacctctcctgtgcatatatccagaagatgtcccaactggtaagaaggacacatgctccactatgttcatagcagccttatttataatagccagaagctggaaagaacccagatgcccctcagcagaggaatggatacagaaaatgtggtacatttacacaatggagtactactcagctattaaaaagaatgaatttatgaaattcctaggcaaatggatggacctggagggcatcatcctgagtgaggtaacccaatcacaaaggaactcgcacaatatgtactcactgttaagtggatattagcccagaaacttaggatacccaagatataagatacaatttgctaaacacatgaaactcaagaagaatgaagaccaaagtgtggacactttgccccttcttggaatttagaacaaaacacccatggaaggagttagagagacaaaatttggagctgtgacaaaaggatggaccatctagtgattgccatatcccgggatccatcacataatcagcttccgaaagctgacaccattgcatacactagcaagattttgctgaaaggacccagatatagctgtcttttgtgagactatgctggggcctagaaaacacagaagtggatgatcacagtcagctattggatggatcacagggcccccaatggaggagctagagaaagtacccaaggagctaaagggaactgcaaccctttaggtggaacaacattatgaactaaccagtaccccggagctcttgtctctagctgcatatgtatcaaaagatggcctagttggccatcactggaaagagaggcccattgaacttgcaaactttatatgtcctagtacaggggaatgccagggccaaaaagggggagtgggtggacaggggagtgggagtgggtgggtatgggggacttttgggatagtattggaaatgtaaatgaggaaaatacctaataaaaaaattataataaaaaatcagggtcttaccctactgctagttaagtgacaggcttgctaatccatgtgcccagtgatcctaaccttgagtttgaacagcatgttcatctagttttaggtatatctttagatggtggagaagaatttgtcttggtcttgtagtagatagggacatctctttatagaagccctggcatgcaaatgtctactccagttatgggtccttccagctttattccagtaataaactatatagaaaggctgagcagctctctctgatggtatctttaatgttttatcaactaccatgtttagggatatgattctaatataataatttcacatttaaaggcttcctttatggtcaggctattttctgatgataatatatactatgcctgagcagagaatcaccaacctatttacaagaagcaaaggtatgatggttggtataactctctagacattctcacatgctactttaaataccataggcaactgctagcaactatattttaaaagtaagacttcctaactcatccccgtctgtaacaaatcttcatatgatcgccactgtaaagtccagcatatagagttgccaaatataaaggaaagtaccaaccatgcatggtggtacatacctgttttcccagtgattcaagaggcggaggatacatgttctagaacaacttaggcaattttgtgagaccttgtatcaaaataaaaagtgagaaaggagatggcaatgaagcccagctgttgaatgattatctaatatgtataaggccatacgcccaaccccttgtacctaatatagaaaactataaatagaaatcacattgaagaaccacctgcccagtacattcttcagagtattcagacggcagccagacaatctgacatgtgcttatcattttgacagtaaatacacagataaaaaatacaactcacacagaatcttgactagaacatgctcatgtaaaaaagacattgatgcatttccaataacttttcctttatagtaaagattagtaatgaaaacattcactagggatatagtaatgggacaaaactatatattagctgtgtgggtagaacagtgggagagtttgtacatttagttaacaggttgctggtttactgggaaatcataataaatcccaaaatgtatattatgtcaataataaaaccaatcaaactatgatgacagttcctcaaggtctatcaggtaatgtgtaaaagtggtactagagcagaggaggaaatgaacatttctttaggttggatgtaaggaagctttgaggatgagtgttagttgggtatttagggttgattgaacttagacaggtccatgaagaggtaaaggaacgacagacatgacatagtttgcagcatagtgtatttgagcacagagaagaaaacctccaaacaatggaactttctttttcctgactgccacacattcttttaactttgaggaaaaagggaaagaaaaaaaaaaaagagtctactgaaccaattgtttcagctgttcctatgtgatcatagcattgcttatatggattgtcaagcaaggaatgagctcataaaaggatattaatgtgtcctctttattgagcaaagtagaattacagaaaaggtgatttcaaaggcacatggctctttcattacagccttcaggggcaatgtttgatcactgaaaactggctgctttgttccagttttctctgatgtttggcattatcctgaatacatatgctctgacttggaaagtatcagtctgtaaagatttaatagattcgagacttgcatactgaaaatacatgtatcctggttaaaattgaataaaaactacttgaatatgtatgtctatatataagcaaacatatttcagacacacatctcagtaaaagtctaaaaagcaatcacacatacatgtttattctgagaatatgaaagttgcctattttaaaaattcatcattgtattaaaactcaggaaaacatatgttaggaggtgttatattggtaagagcaaaatatgggaaacttgcctgtttcagggaatctaagtagctacatgcccttgttacctgtcactgacacaatttcttaattttgatgacccctgagcacaggtgaggatgctgtgtggctggtagagagtttgtctcataagcccaaagcccttgggtggatctctaataccatgtaagctggatgtagtagcacaagatgtaatccaggcacctgggaagctagaagcagcaaaatcataagtctgtggaatacttgggctgcaacatgagttgaagagcagccttgactaaacaaaacattttctaaatagaaaaagagaaggagggaggggggaagaaagagagagagaggagaggagaggagaggagagagagagagagagagagagagagagagagagagagagagaaagagagaatagtgactttcctattttgatagaaacaaacaaaaaggtagtcacatgttaaagaaaaattttctgtgttagcatttgcatgatgtccttttcctaatattaataaaagaactgaatatccttttattattattaagtagagagatagatgcttaaagagagactagaagcttttcctgcagtgactaaaactcgtaattttgttgtcataaaattccctggcttcttgctcctacaaatggatatacaattttgcacaaatttatcttttgaattttgcatccctttgaacctttgaaagaagatggcattcccagtcagtcagttggctataaatcatattgaagaatagacactcattgtactgaaattaagttcaacactttcagctaaaaggtgttcaactatattatatcctatttcacatgataaagaaaaaattttccttaacacatgttgcaattccttttgctccccctctccaactcagtgacatgaggctttctgtgggagggtggcacattcctctctgactgcttttgcagcgatccccaaacagaggctatttcagttgtttacttgcagcccagaccaatgctttacaaaccttaatgtgcttattaatcatctggggatcttgttaaaaaggcaggctctgattcagcaagtctagccgagattctaacaagctcccgggtgatatggtggactagagtttgggtagttaatgtctagagtacaaatgacctcttattaaattggtgtttgttcccaggccctgataactggaaatggagattccccaactttaaagttactccacatcaatgttttgttcagtgtaaagttaattttaaaaaattgtataattttgactctcttcatttatcccttcttaaaaacaaaagcaaatcactccctctctaactttccaggttaggcctaataaactgctgaaagtttccagaagtttctttttgcatctttgtgccctcccaatgctgttccctttgtctatccttgtatcacgtgactcatcctttgaagctcacattggctgtagtctccttctgaattccttcaattccttctccttatctttttcctttggaaacaaatgcctctgagacttcataacaccctgcatttcatatactatgctttcttcctcttcttttgaaatggtctgtctacttgttcactctttgcaggaccaggcttctgtggatatatatatatatatatgtatatataattcctgatacatactaccaatcacaaggcctaacatacttggtttactgactgagtgaaaagggtgtactgtaatcatagaaaaatataatgtaatatatttttcccagtggaccttaaacttgagttgaaaataataagaactaaactcataaaaagttaaatacaagctgggcggtggtcaggaggcagaggcaggcggatttctgagttcgaggccagcctggtctacaaagtgagttccaggacagccagggctacacagagaaatcctgtattgaaaaaccaaaaccaaaccaaaccaaaccgaaacaaaaaacaaacaaacaaacaaaccccaaaataacaaaaacgaaaagaaaaagttaaatacaggatgatataatagtggtataaaatgttagtatgtgatttatcatagcaaatatgtgttctgaggtgactgacaaaatattgccatgtttttaaaaattatttatcttatacttcagtttattccataaagtacttggaacttgtaactccatgtagtaaggttaattaaggtatggaaacataagtagttaagagaaaggtatgagaaatcaaaagggggctgtggctcagatacaaaaagctcaagaaccagacaaacgaatcttcaggcctgatgttctcggcataggatggtactgtttacaggttggacttccgcttgggaggttcaagtccacctaggctcttagcagctctcctgtcctctagcttcttgttaatattaggataagaacatcatacaaatgctaacacacaaaaaattgctttttaatgtgtgactcccattttgtttgtaacgatgaaagtaactactcaccatagtctccctgtttttgtctctttctgtctctgtctctctctgtctgatggacaattgtttctttggttacctagtggtgaccgtacctctgtgtaaatgtccctatgcatatcaagtcccttcagatatctttgattgtgatacatgctgagacacaggcatgatcagaacattttgaaataggtgaaattccagctttagaaacatttacaaaaaccatgaatgctgtgaaagggttataatatcttagcagactaaacactaaagaagaaaggaaaatagagaatttatttttcaaaagagaacaattaaaaaagcagacgaagctagcattttgtccttataagcttacatttcgtatggtcaagaagctttgagccaccatggaggaagggacaaattgctatcctatttgattgcctgcagttgtgtaatgctctttacaccagttatgagttaccattcatttgtgacacaattatattgcagaaaatgtgccatgagatctgtttagactagagccgtctgtccagaactataggccactcatctgtttggagctcagatttgattgttcccctgcctgttctccttgtattgggagacacagaaagaaaataaatgaacaaaagccttaacattagcgtctgtgatgaaaggtttgtccaggaggctgaaatcctgaaccgaagtgattcttttgttttgctgggttggtctgccacctattgccataaaggtattgagtatcatctctagcctgtcaagaagcaacagataaaaatgatcaagaagacttaaaatcacattgatgacaagaagcaaatctgaaaaataaataggaagctgttagtatgaactcttggtatacacattgctctgtctttgggtcttggattccattatagccttgtttgcagtacatattcaaacaaggctataattgctgctgacttgtacgtgctaattctttgacctggtagaatgtaccaaatattctggcagggaaggggcgtatttcctggtgcgtggtacatttttgatagtcaggttaaatttctgtttaactaaggaagaaactgagtaagaacagtttatgtgaggcaatgcacatctgttttgctcttcactgttgaaccttttttttttaagtttattttctttcttctcagggtctgtttatgagatgtttggcaatgaatgctgtctgtcaacaggagaagtgattaaaatcaccggtctcaaaattaagaagatgatggctgaaatttgtgagggcgctattggaggttgtgagtctcagaagccttttgagctgcccatgaattttccaggtatttctattgcatctacttcacagaacacagaaataatgatagctttccttatgaatataatagtggtcatttctctctgttgttttaaaaatcaaaaatcccagctgtttgactttagcacatgaagatttaggagccaggagttgtggtgaaagcttccttgctcagagaggccaagaaagcacccgactgatcttcctactccaccagcatcctagaaggaaaaagctttcttctccttcatattgtcttaaatacctcccagcttaagatccctcctttctgtttcttaccctctgtccactggttgccagctctgactctttttttttttttttttttttttttggtttttcgagacacggtttctctgcatagccctggctgtcctggaactcactttgtagaccatgctggccttgaactcagaaatcctgcctcccaagtgctgggattaaaggcgtgcaccaccacacccggacagctctgactcttaacctagactttatttagctcttggattaaaggaatgtacaaaggctgagccacatcacaaggttttaccagttcacaatctgatcaaatgtgatcaaatatcctgcaatgttgtataccggcccgcggcctatatcaacggggtaaacctgggaggctggctggggctgaaaaagacttagactgggagagattaatggagaccaagacaggattctgttcaaggcccactgtttattaagagaccgtgcttttaagggggaaggcctatcccccaccccaccccccaccccaaccatgccaggcttcttgatgtattgttgccaagtagttagcactagtctgccagctccacacttggtgcctggagccattttgtcagcgctggtcgccaggctggccgctcattcaggaagttctcaggaaaacaggtttagcctctctgcaggtagcagaagagcagggcagttgtcacttcaaaaagaagctggacaagtcggaaagctgcaccgcacctcagtggcagcatggtctataccagccccacactgcaacatttctcttgttgttgttgttgttgttgttgttgttgttgttgttgttgctattgctgctgctgctcctgctgctattgtttctcaccacgtaatccagactgacattgaactcaagagtgtcctgcctgggctgctgaatgctaaaattacaagtttgcaatggtgctaacttcgaaaactaggctgtgtgttgtgtgggttgaagaagataaaattcctataggtcaatcaattccatatctacaaaggacaatctgttatgcattggacacaaatgttggtccattgtctgatcctatcatatagggaatctacacctgggtgagattacctctagcaacttcttagctactacctttgtagtagtctcagtcttcattggaaatgtttctgtccttctagggctaccttgtatagtctatactcagtctcagaggccaagtcaagttcaacacctggatcggatcattgttctgacctattaactggactttcccaggtttaaaatgtatctgggccctcattttagctgggagatccctccccagtagggggtaggggcactcagggatgactgagtgaatgggttaccatcccattctcaagtccactgttcttcgggtagtacatgaatattatttggtgcctgtgttcccttagacccaggacttcttaggagacaatggcccttcagcctttacaagcactgaagattaagctccggtgtccaccaggaattccagaggctttccctgcactctaaggattaccctggcttggggaaggaggtctgttccctgactccctcaatcttttgtttttccttggtgattatagtcttattctttggctttctctttgggcattctctagtccagtatccttcttacttacaacaggtggttgtagctgtaatggttcttagctaagattggtggacaaccttttctaggctttttcccctcagcaatattttgaagttggcacttcctctgtctctaatctggattactattggcaagaaggactttggctagatctctgtttattagcttctctgtcttaatcttcttttcatctttagtctccctactatggtataccttcttcacaacctccactaaatctctcaatgacttctctctcttagtctttctaacttctgaaacttccttctaatggtcggtgctgatttataaatgccagcgctactgtgttagaattctcagtctcctcaggatttaggtgtgtataatggcagaaagtgtccataatctgcttgagaaactctgttgggcctttatcatcctttagcctgacatcataaaccttagccaaatttgggtcgatgagtggctgtcctgagacccgccattagaggttggtgatagactcggaaatgctcccacccttcaccagtattatagccccaagcagtctcctgaggggaaatcttttgtctgtcaacggggttctggggtggagtgcccttaggacatggaacattctttggacctccaatatgatgtgtttcttttcctcagttgtaaagaggatctttaagagctgctgacaatcatttcaagtgggctgatgggtaaaaaggatattgtctaagagaccaatgagctctctagcatagtcagagagtctggcattctctctcctccaattataaaaatcagcaatagtgaagggccaataatggtggagttgattctcctgttggtcagctgattctgttgcccttaggcgtaagacagtggaatctgcccagctctatagcctaaggaggcattgagtgcctgcttccggttccctgtgcagccccccccccctgcccagcccattcttgaagttgatactattgaggctgttggcacctcctccgagggtagggggagcaagggcagggctggagctggtacagccaaagctggtgcctgtgggaagcttgcgcagctgaaacttgtgtgtaaggagatgggaagagaacatcttccgatgtagtggcctataaaatggggtgaagaggcacaggaggtttgcggacttcctgtttacattcttccaccaccagggccgacatgatgaagaagcgttagctggagggaagaggaaggacttaacccacagtggtcgattattaactaaatccttccaaacatacagggaacttgatctgggtgtccacgtgctttttggaacactctgtcatctactgccaacaccatagggatgtgaaaggtcccctctggcggccattcaactaggaaggctggacactctgagctggtatatgtgtgtatattttccctttcttcatatccactgagagattgtgaactctagttttcatttccttaaaatgagctaaaagaatgttgagggtgtgagaatcagtctgtcccatatcaaagtatagtacaacacgaaacaaaacatttcaagggacgcaacagacagacccacacgcacgaagtagccacttagtgactggaaacaaaaatatatccaaacactagaactcacagactctggcctcagaaactgaaagcgaggtagagaggaaagcagcccttcctcgtcacaaattccccccacccccactcgccccacaggtaccggacaagccctcaggaagtccagggatgtgtccctggtcccggcattggtggctctccagtgagtatgctctagccaccctctgctgcttttccaaacacctcgaggcttttccaatgccaaaagcaagaacagaacagacacaaccagtatagaaatactgacactcaccagccagcactagactctcccaattgcaggctctggagatctgctgaggaatctcagaagagtcccagaatgttatgcccagttcatgggaaccccagaagaccgccagaaattgcgatactgatgtactaaacaaagagagtttttattatacgagtgtgggtgctatcacagaccttccagctgcacaggttaggaaagcgatgctcaagttcaagggtttgagatatatatatatatatatgaaaatgcatatgctggggcgctcaaggcctggcattacatgattgagtagggggaaaggtgtgcggtccttcaaattgataacatttgtttagacagagaggcggaatttcgcagttggagaaggacctctttgacctggggaagaagtaactcatcccattataggaggccagcgtgttgttacaaagcagtcacagctgtttgggaacacttaattgtctctttcccatagctcaggagtgtgctttatcacatcaaggatactaactcttgcctccttcaaaggcaagagccatctacaccaggaaagtgctattggttagaattatcagaaaaagggagcgcaatatacagtgctaggcaggaggccacgttccagctcccctttgtctgccctcttcaaaggtcgcaagaaggttgcggaaaggaagtgctggccattctggctcaggaaggggcgatgcgaagagacaggggcaggttacctgggtctcctcattccgacagtgtgggtaccacagcatgcatatcattgggtggtcattatatttacctgtcttgtgctctagactatgagctgtcaaacttgctttaaacagccagatagtaaattttaaggctttgtggccagattgttgccataactactgtacagcaatcttttaacatgaaggtcactgcaggtaacaaacccatcaaccaatggccgtggttgtagctcaaaatactctttatttataaaaaggagtggctagcaggatttggctagtcaagttatttgttgatatgtgctctgcactactaatttccagtcttcatagttctatcaccatacacattgaggataaattaaaaaacctgtcaattggatgaataagagagtagcgaatgaaaaatcacaaacgcattacaatataatatgctttacagtatgattaacgtatgcctgggctatgtgagaagctgcataggatcagtaggtcatgttacagaacatgaattttgtagttctacaagcaatttcaccatgttttgattgaattaccttggcatgttattttttttccaccgtatgtaaagttaaatactggtattcctacttgtctcctggtgcctttgtggaggatattatcaaaacataattaaagtgcttgctatggcatctggactatagcaacattcataaaaatggtgataacttatattactgttattaagattcttattgatatcattggggaagtagaaaatgcttttcagagaatgttataattgacctgatgtttggagagtaaaaataaattggttatattaatgagaagattcttgcaagtgctctaattctctgtccctttgaaccgaaagcttacccattttttttatatccttcctggtctttcaaaatgatggctggttttcaagcttggctgcacagtgacctcatctagggagattagaaagtcgtgatgcaggaggtatcatgatttatttgggcaaagtctggtcatgaagattcttcaaagctcccaagctaggactaacatgaacctgaggctgggaaccatggctttatagacaacattcctaagtagcaaagttagatgtaattgctctcctcatatgtatatgtgcatgtgaatgcatatgtgaacgtgtgtatatataatacacatacatatacacacatgtacatatatacacatgtatatatatttatgaatgtgtgtgtgtgtgtgtgtgtgtgtgtgtgtgtgtgtatgcgcagggtttcactatgtagcccaatctggcttggaacttcctttgtagaacagtcctcaaacacacaaaagagtgcccgcctcttcttccaaaacgttgtgagtagaggcatgtgctctcaccccaggttaagtacttttatgcctttattatttcacttattgctttttacatgtatttggagttagttttgtgtttgttggagtagcgtgatctaatagataacaaggcggctaagagcaaaagcaaaatcatttatcactgtaattctcagtacagaataaacactcactaagtttaaatgttcagaattttcagatagaggaatcgtttcttattggattagtgaaaacacctgggtagtggctgaagtctaaggtcatcactatctggaacttcctttgggctggggttagcgtgatgtctttgtcattaattgggtaagagtttaaaggtgtttacaggtgagccttcttgtaagggtcagaattaaagcagaggtgatgaaggacgatgagagaatgctctcttccgaaaagactccaggatcctacataaatgtttcctcttcattatcactaggggaaaagaccagaatcaagtcctttatcacagatctcaacagtaacatatgccttttccacgttaaaacctttcatttaaattccaattatattttaaaattttaaagccccgtggcacttttaacacatgtttttattggtatatatttattatgcatagtgataggcttcattcccgtgactctgtcatgtactttggatacattcactctcctttcttttctaatctctcccgttttcccattcattcccatttcatgtcgactcttgctccttcattaaaatatgattgcacatatatgtacaccctatgtcattttacatatatgtgtgaaaacctaggatccacaagtaaatgagaaatggaaacaagtgatatcaccatcatctttagctgtgcctatttttttcggcaagtgttataatgcaatcctttatggttaaatagagcaccactgtgcacgcacagcacaagttctttatcagttcttctgtggatgactacttgggatgattccataacttgacttctgtggacagtgcagcaacaaacatacagatgacaacatctctacaggatgttcatttataggctctgggcttgtagctcgagttgatgtatttgggtcatatgctcgttctcctcttagcttattgaggaactttcatatttatttctatggggctgtaataattgatatttccatgccagaatttgctgtgatttatcttcttaatgataatcattctggtgggaataagattgaatcttaatgctgtatgactttgtaatttttggatgcccaaggattttgaacacattttctgaaaactgttagttacattggtccatttattgagtaagttgttcagatattttgagttcttcatgtagtctagattctaatcttctgtgtgactatcaaagattttcttctaaagttgtctgttcaccaagttgttctcgttgctgtttagaaacttataaattctgtcacatttcttaaagcttcaaaattcctttttttttttttttttgtgacagaaccaaactaggggaataaaagatatctataatgaaaaactttaaacactcaataaattcatgaaaaagacgctaaacagtgtagagatggctcaggggttaagaacactatctgctcttcccaaagtcctgtgttccccagcaaccacatggtgtctcacaatcatctataatgatatctggtgccctcttctggcctgcaggcatacgtgcagccagaactctattatatatatatatatctttttaaagacactaaacaacaggaagatacccccaaagtattttaaacatcttgttttatttgcttaactcttcaaatttcctcttatggttgatttctaattcaattcaattatcagaggacatactttctgaaattcaaatttaaaaatatactaatacttgtttttatactctgtatagaagaatatatattctaccattatagaagtccattaaagatacttgttcatttatagaattatttacaccacctaggtgatcttttctacttgatctttcacaacagcatatccattattaaaatcatgtatgtgtatgttaaataaaaataaataagagttatctagggaaagaaagaataaacaggaaaggttatgggtatgaaaagggaggtaagtgggatagggtcgggggtagaatatgctcatcaaagaatatatgacgtcaaagaatatatatctttttaaaaagaaatttcttcttcttcttcttcttcttcttcttcttcttcttcttcttcttcttcttcttcttcttcttcttcttcttctttttcttctcttcctcctcctcctcctccccctccttttctccttctcttccttcacctcctcctcattcttcctgtattatttggattcctaaaattgtgtatttttttgtttaatgtactttgagagtcgggggacatgtgtatctatatttataattgctagtggttttgagtggagagtttcttttaacttcaagataccttttatagtaataacattttaaaatgtaaatttggttccaatttatttttaaacattgtcttgatttgtagccaagcttggaactgttttcacaatattcttgctatagcctactgagagctgagattacaagtgtgcaccaacatgccttgctatattgtttctgatttaaaatagtttcttcattttttttgctttcttatttttaacaactaattgtacaggctatcatctacatttttactctctacctacttatgtctttaaatttaaagtctcttttgatacacatagtatatgctttgatatttttcttctatcatattaagggtggtttaatcattatctgcttttagttaatatcataactgatagtaaagaatttagtgctattgttttgccacttgtttttcatgttttttatttttcattgctctctacattttccataatgaatattttttagcattccactttagttcctttgcattttaatagatttttacatttacatagagaagttttgggtttataaaaaaaaaaacctaagtagaagtcgctttagtgagatttagtatgcaaaacaccgaaatcaaccaaccaaacataccagaaaaaaaaaaaaaaaaaaaaagaaagatgaattctccccactctgattattggactgaatagtaaaaatagtaacagtctgtttatttttaaaaagtaccagattgtcctgcaaaatatcattttgtactactatgaacaatgaatgaacatccctgttcgatgtcctctccaggaattttctctatcagtgtctgcatttggccattctatacattcaagtctatgatattaaagtcattttttaaatctgtaattcccaggtggaatatgaactttatttgatgagatacttgaagttttttgcccattaaaagctgtgctatggtttccttacattatgcactctgtatacttgtgatgcccagttttgatcacattttgctttggttaatagtttttcttaaatttgtggtttgccttttaattctcatctttatggaagttttttttttaaaaagtctaatttaccttttgtttcttttctagattgtgctttacaactgtatttaatgttcatcttcaaatccagtgccatttatgacttcttaagtagttacctggtatttgggggatttcctgctctgtattttgagttaatatttaaaaggttgtatgttctatattcacttctcgcatacagtggtcaagcaccttttgttgcaaaccactggatcaggtttcttttgttttctttagtggattatacttctatggaaacattattgcactgtacattgtatcacattgttcagtctttttttaaagatttatttatttattatatgtaagtacactgtagctgtcttcagacactccagaagagggcatcagatcttgttatggatggttgtgagccaccatgtggttgctgggatttgaactccggaccttcggaagagcagtcaggtgctcttacccactgagccatctcaccagccctgttcagtctttttatcctttcactatcagcaccttttctatactgttgtttactttgtaataagtcttgatgtcaggtaactcttctaaagttgtccttcttcttccaaatgttacgtattctgtggttctttgcctcttcatatcaactgtaagttatcattaatattcataagataacttcccagcattttgactggagttatgattaatttacagatctaggtgggaagacttgagtttttattacagtagtgaaactttctagccataaatgtagaatattactctattagtttagacagttttatttttctcagaattctatattcttcttcatagagaagtaatacacacacacacacacacacacacacacatatatatatatatatatttagaactattggatttagagatacctaatttattttttactacctattaatttatttattgggggaagtgtatatggggcaagatgttcatgtaagggtcagaggacaacttgtgagagtcagttctttttaatatggatcctgaggatcaaacacaggtcatccggtttggtgataggcttcctaaaccattttgccagctcatcattttgagtatactaatgacattttaaaatttttcaattactgcttgactattgcttacaaaaatatgtatttaaaaataatcatttgtttcttgctggaattgcccccttgccttcagggatggttttatccaacactaactaggatttgttgttgttgttgttgattccttaagatgttctacatgaacaaatgtgctatctgtgaacaaagaaacttttgtttgagcctactactattggtgaccagtgcgattttgaaaataagacgaaagaagttgtgtgtgcctttactaccatctaattagcaagctctccttgtgttctaacttgctgaggtttgtgcgatcattttttttgtactccatgaatataatatcaaatactttttctgcatctattagtgtgatcataagattttctttctttagcttgtatatatgatatatcatattaattaatttttaaatgtcagattattcttacattggtaaataagaaacacagtgatcatgcagtataatttctttctaccagcataagatttaatttgttattttgagggattcttatacttgaagtaatgacaatgcattgaaaattacattgctacatagtattcttttcttattacattggcattacaataatgttgggattaccttagattaaatcagaaagtatcacgctattttcatccttagggaatattaacagtgtatttcataatttgtttcttaaatgtttataagaactttttggtgaaccccatctgggcctggcattttgtggtcaggaagtcattaattattaacccaatatctttgataaatataggtctattgatagatcctgttccttttttgatgaggtgactatttcaagcaggttagaaagatggtgagaatatgttcattcatatggtgtgtttactaacacttgcagtgacacaggatttgcagagatctcagtctattttgatttgaggtatttctgtctactttttctctttgttttcattactacagccaaatattatcctattttcttgatctttttaaaggtgctaaaagagagcttttttgtgttacacattgatacatgtacacatacacatatgcaaacacatgcaaggacgtgtccatgcacatacacatacatacacatgtccattcatgtactcacatgcacatatactcatacatgcatgcatacatgcacacacacatgcaaaagaatgaacagacatgctcatggacacacacttatatacatgcatccactcatgcactcagaggcacattgatacacacacacacacacacatatggaataaattctagcactttctttgtgaggcagttctctaatgacagcagagttccttgatttttatcagggagagtgctttaatttctttcatatttgaaggacaattttcctatttgtggactgaggtcaatgggctgctttccttaaatactttatgaaattcacttcactgtctagtttcctagttctagtaaattcaatgcctattttgtcctaccatagatgtttcgtcccccagaattctttggtaaattttctgtagtatgctgagatgcagtttttgccttttgtcctgctcagtgtcctctggcttccccgaatctctttactgaatctgcttttatgtttagcattaatttggaagacgttccttattatttcttcatgtttctctgcaatatcttctcttgacattgctataatgaatattttgtatcttctgatttttatggtccttggatattctgggatttttaaagatgtattactatatttcctgattgtttttctagaagatttttctagagatcgcccccccaccaccaccttgctctaagagtgattcagatatgtgagcctgaccatagagcttattttgtttcatcaaaatgtgtacttttgttagagcctgtatgcattataattttcttcttgctcatcagccatgagtgacagctgctgaagcatatatagtgtgacaggcactatatatagtgtgacaggcactatatatgcctataatgaagagatgacaagctgtaggataaggatatatcttctgtagttctcattctcaagttgagcctctgcctctgaactatgactttcatgaaaatctgccctgcccttaggtgggacaggatggggacagtgggctgcttttgtgcagatggttatcttcctcctctaaagtagaaggctagaagagccggtgttctagctggcattatcatccatgccttgggctaggtaagctttgataaaattccaatcatttatgtgttggtaaattagtttttcttgtgggcattttggatttccttggagaggaatttcatctccttgtctcttgggttgtcccactccagcttcatctctcacacagaattcaattggtatttatatctgcagatacacagccatcattttccgcctaggcttctttcctaaatcacagatgtgaacttaatgtcagactagacttttcagctcacatgtcatagacatttaaagaatccagacttagaaataatatacactcttacactattttttagtgtttgtcctgcagattacaaggaacatttttatttttaacaatatagtttggactaattaatttgagtgtctttcagagattcacttaaaaaaaaagtctaactttgaaggtttttgtgagtttttcttgatctgtgatttttctatgcctctgtttatactctcataatttccattttcctgtgcacatttgtgtctgatagatcttggggctatgttcactttctgtcttcttcatactctgggcagtcacagttaactccaaatatgactaattatcttcttttgtaagatagcattctcatgcctttatctctataaaccaaatttccttgaatctaacgtaacttgcacaaattatttctctgtgaagtttgttgtctaggctttgtcaggcaccatctctcatggattcttcatcttctggcccctctccttcccactccctttctcctcgttcccctcccccattcccatgtatgctccatgctctctgtcactctctctctctgtctctctctctgtctctctctgtctctctctctctgtctctctgtctctctctctctagtctgattcattctttttcttaaaaactgaatatattttaatatatttttgtttatttcttgtgtgtgaacatgcgtggctcacatacatgctacagtgatcatgtagagtttagaggataacttttggtgcttggttatcttcctctactgcatggatccagaaatctatcttaagttaccaggatcagcaacaggaacctttatcgctgttaatctcacgtggccctgaaatctgaatgtttctaagagctgaatgtagacacactaaaaaacctgcccttcctctccttgaggcttcttactgctagctggttaccagttttccttaccaaagtccactctctttgttatgtgtggctactaaatattttttctttttttttttagaaaaaaaaaagttgttttttcagacaactcttaatcttttttttcttcagttgaaatctataagtcttaagcttttgttaagcgatttctctctttatttgggttatgtcattgaatctattagaatccattaaatgcattagaaactgtggccaaggaagcctagacattgaactttattgttagctattttaacatggaatcctgtacacgggcataattgttcatgatgagtatgtggccttctaaaccctctgcagtttgttgaggcatctcagtgtccttaggacatcttgtggaccctggttattttaaacatctcatgccatacccttggtcttcgctgttattgcaggtagctgaggacagcaagtactacctactgtgtctttgacaaatgtttttagtagaagggttttaaaatttttattttatttctttgccatggaatgtacaaaaaattagtaaaataaagatgactttctagtgtggcttagcgaggtactagacagtaaataattgcagttttctggaattgtgtttgaagagccttcagccatcttcttccacagtatgatgcttttaggctgctggttttcaaaactaccatgaaactttggatggagacaatggagggtggggacttgattattctgcttgtgagattcagtcacataaatgaatttttcaatttctccaacttcttgtttaatttctaagccctccttagaaattgctaagaagcagtttgctgttcttatgcaggaagtaacttctagcaactcctgctttatcattttagatgatttccatcaccctgtattgaagtatttaaatacagatactcattgctggtggtgagacctggagagatgatcccacaaagtttcatttgcaagtaaataaaacccactgacaaaagatacagaactttgcaacaaacgcatgcttctaaaaactccggcttgaacaaacaagcatcaaggcaggaaaggtttgtggggatttgagagaaatgttttagggaacaggtacaaatcttctttgctaaaaggtagacaggagaacgaattttcaacacacacccatttatatactataatataatgcttccatatgtttctattttgtcacctcccaaatgctcaaatacattaaaagataaaaagtgaatattacatttctctgtgggaataaaccaactgcccaagaagaacagtttgttcttttcaaagacagctctcttggctgagctggaaaacttagcagttgctgccaaacacaacaaaaatatatcctgatgcttggtcgctgattgcattatctgcatagattggtaaatcacatcatacttggtttacaaacaggatccaaattcctagattactttcttgaaagatttattcctcctttgtggtatgaggaagtgtgaataacaatcatctcctggttagccatgagaaataccctgtaagaaattgtttccctacatctttatgatgagcaatgatgtttttcccaaacggcaattgtacactgtatctctgatactctggtttcccttgaaaccttataaatcttttaccttttccattgtgtctctcaaccataggctcataggatatctgaatcgacccataaaactgctgctagaattgcaagactagattgaagaaatgtttctccttgtatttttatatcctagtctatgaattgtgttactgtgcagaaatcctatttcaggaggcagggagcctggagaagatgtaaaagcaaagctcaggggtgggttagcccctgttactacacaccctgagctctcctagcacattgcatgaaggtaatgcgatgatgcatcaggcaccattttgaatacatgtgtgtatgtataagttatatccattcacatttgccacttgtgttaatgagaggcagagtaaagtccaaagtcatgtagttagtaagtggcttttatttaaatgtgtgctagctctggctagtagaaatgaattacataacaaattaaacatttctaataggtccattaaagtattatgtagtactgcatttaaaaatcacctccagctggggagtggtggtgcacgcatttaatcccagcacttgggaggcagaggcaggtggatttctgagttcgaggccagcctggtctacagagtgaattccaggatggccagagctacacagagaaaccctgtctcaaaaaacaaacaaacaaactcacctccaaattcagcaacttcagacgaaaaacatcttacatgctttcttgagcatatgaaaaagttttaaaaattattagccaactatttattaaaactagctcaataaagtgcttctaaataaaattggttttgataaaatgataaaaatgatcaaataaatatgtgatttttgcctgggttttgaaatgcctaattcattaacatttgtttaagtgaatttatttggagactggtatatttaattcatggaataactgtaatcttacattcagtgggtctgtgttatgggatattcaccagaaaagactgctcatacatgggtttaagccaatagaaagtcttttcttagccagataggaactacagatcatgctaatatagccatgaggctttctcaaggtgagcttttaagcacacacacaaaaaaccccccaacatattcttggttgacacttcaagaagcaagaatagttagccgggagcagaactaaagaaaaaagcaaagttactaaagagcatgttaagtatgttttgaaatgctcccagaattatacggactctgatggagtgggctttattttaggtttggcaggtggtgctgcaaacttactgagttttacagactgaacgggaattcatcacaaagtcagttgtcctaaggtctggggggtctactaaggtttggggtcctataacaggatgctggctaaatgtttttgttttattttgttaatttgacacacattcaatcccctgagaggaggtgagaaaatacctctatagcattaactgataagcaaagtgtgggtgctttcttgattaatgattaatgtgggagggccctgctaactgggagggaagtgctacctgtgggcaggtgggtctgtacaatataaaaagcaggcttaggaagccatgcaaagcaagccagtgctcctacaggacctctgctttggttcctgccttgagttcctgccttgagttcctgctctgacttccctgactgatggactgggacctgagagttgtaggctgaaataaacccttcctttcctaagttgcttttggtcatggtgcttctcacagaagcagtcagcctatgataagcagagattgcttatgtttcaccctcccactgaagtgtgtatctcttccacagcttataatcatgggcacttcttcatttgtctgaagtatgagttcttaaaaatctgataaacattatgcaaaagtgtatttaaaatatacttttctggtaagtagtatcttgatctgtttttgaagaaagcttgttaaaagaagcaagatgtttctgcctggctgggaggacaaaggggagttcagagtggctctgtacagaactctgtctcacagaacttgcttccaaagcaggaactagttttccacattttctgggtcagattctcataagctgtgccattcccactgtgctcacttatgcaaactaaactcagctgtgactattagacaaaatattttcctgacaaaaaagggatccctgtacaaactatgggagaaaatacaaattagcacgcagaagaaagccagtcttttgtggtaatatactgttttaattttggggtcacctgtcttgcacatttaagacatagattctaagtttctagcaatcacatatatcacctgaaagacaaatagattttaaaattctaggttaaaacagtattttgctttccacctatatgttcattgtttttagcattagaccagtgttttatcaaaaaaaaaaaaaaaaaaaactgtttgaaaatgggcaactctccagctgctgctgttctctattcgtgcctctttctaagctctattttattacttcatgttcatcttttcctgtacgtgtacttctcccagtgatacggtttttagagcaacatcatggaaaggccatcatgagagcatctacgttgtccttgaaaactatgaacactggtgttcgggtctttcactcttaacagaacagtaagatcgtatgttacttatactcaacgttgtttcaaggatttagaggctgtttataacatccttcataataatatctagctataaaattagtacaaatcctgccttctatcttgctgctgctgcttctttctttcttcttcttcttcttcttcttcttcttcttcttcttcttcttcttcttcttcttcttcttcatcttgtttttgagacagtgtttctctgtgtagccttgctgtcctgacactcactctgcagaccaggctggcctcaatcttgcttcttttaataagaatcattggaatacaagctggttttcatatcctccttgactccacaaaccaatatgcatagtgccagccatgatcaacagtctcaccagagtgatacaagtgttgcagtcaaagaacctacactctctggtcattatcaaagttcatagctcctatttaattactcttggtgtcatatagtctatgggttttgaaacatgtataataacacatactcgccattatggtgtcataagaaagagtttcgctgccttgagagtcctctgccacattttgtagcctctctgctgccatacctttaccgactctgtagtcttgtcttttctaaacatcacatgactggaattatgtggtaatatagccttttcagattttcttctcttattccctcaataaggtttcccatagtttttcatggacattgataaatgtgtttttatgccctgaagtttattttttttccatttttattaggtatttagctcatttacatttccaatgctataccaaaagtcccccatacccacccaccccccactcccctacccacccactccccctttttggccctggcgttcccctgtactggggcatataaagtttgcgtgtcaaatgggcctctctttccagtgatggccagctaggccatcttttgatacatatgcagctagagtcaagagctccggggtactggttagttcataatgttgttccacctatagggttgcagatccctttagctccttgggtactttctctagctcctccattgggagccctgtgatccatccattagctgactgtgggcatccacttctgtgtttgctaggccccggcatagtctcacaagagacagctacatctgggtcctttcgataaaatcttgctagtgtnnnnnnnnnnnnnnnnnnnnatttgtagccaagcttggaactgttttcccaatattcttgctatagcctactgagagctgagattacaagtgtgcaccaacatgccttgctatattgtttctgatttaaaatagtttcttcatttttttttttgctttcttatttttaacaactaattgtacaggccatcatctacatttttactctctacctacttatgtctttaaatttaaagtctcttttgatacacatagtatatgctttgatatttttcttctatcatattaagtgtggtttaatcattatctgctattatctgcttttagttaatatcataactgatagtaaagaatttagtgctattgttttgccacttgtttttcatgttttttttatttttcattgctctctacattttccataatgaatattttttagcattccactttagttcctttgcattttaatagatttttacatttacatagagaagttttgggtttataaaaaaaaaaaaaaactaagtagaagtcgctttagtttatccaaaacaccaaaatcaaccaaccaaacataccaaaaaaaaaaaaaaagatgaattctccccactctgattattggactgcatagtaaaaatagtaacagtctgtttatttttaaaaagtaccagattgtcctgcaaaatatcattttgtactactatgaacaatgaatgaacatccctgttcgatgtcctctccaggaattttctctatcagtgtctgcatttggccattctacacattcaagtctatgatattaaagtcattttttaaatctgtaattcccaggtggaatatgaactttctttgatgagatagttgaagttttttgcccattaaaagctgtgctatgggtgctggtgagatggctcagtgggtaagagcacctgactgctcttccgaaggtccagagttcaaatcccagcaaccacatggtggctcacaaccatctgtaatgagatctgactccctcttctggaatgtctgaagacagctacagtgtacttacatataacaaataaataaatcttaaaaaaaaaaannnnnnnnnnnnnnnnnnnnnnnnnnnnnnnnnnnnnnnnnnnnnnnnnnnnnnnnnnnnnnnnnnnnnnnnnnnnnnnnnnnnnnnnnnnnnnnnnnnnnnnnnnnnnnnnnnnnnnnnnnnnnnnnnnnnnnnnnnnnnnnnnnnnnnnnnnnnnnnnnnnnnnnnnnnnnnnnnnnnnnnnnnnnnnnnnnnnnnnnnnnnnnnnnnnnnnnnnnnnnnnnnnnnnnnnnnnnnnnnnnnnnnnnnnnnnnnnnnnnnnnnnnnnnnnnnnnnnnnnnnnnnnnnnnnnnnnnnnnnnnnnnnnnnnnnnnnnnnnnnnnnnnnnnnnnnnnnnnnnnnnnnnnnnnnnnnnnnnnnnnnnnnnnnnnnnnnnnnnnnnnnnnnnnnnnnnnnnnnnnnnnnnnnnnnnnnnnnnnnnnnnnnnnnnnnnnnnnnnnnnnnnnnnnnnnnnnnnnnnnnnnnnnnnnnnnnnnnnnnnnnnnnnnntcactatcagcacctttttctatactgttgtttactttgtaataagtcttgatgtcaggtaactcttttaaagttgtccttcttccaaatgttacctattctgtggttctttgcctcttcatatcaactgtaagttatcattaatattcataagataacttcccagcattttgactggagttatgattaatttacagatctaggtgggaagacttgagtttttattacagtagtgaaactttctagccataaatgtagaatattactctattagtttagacagttttatttttctcagaattctatattcttcttcatagagaagtaatatatatatatatatatgtatatatatatattgatatagttagaactattggatttagagatacctaatttatttttcactacctattaatttatttattgggggaagtgtatatggggcaagatgttcatgtaagggtcagaggacaacttgtgagagtcagttctattttatatggatcctgaggatcaaacacaggtcatccggtttggtgataggcttcctaaaccattttgccagctcatcattttgagtatactaatgacattttaaaatttttccattactgcttgactattgcttacaaaaatatgtatttaaaaataaccatttgtttcttgctggaattgcccccttgccttcagggatggttttatccaacactaactaggatttgttgttgttgttgttgttgttgttgttgttgttgttgttgttgattccttaagatgctctacatgaacaaatgtgctatctgtgaacaaagaaacttttgtttgagcctactactattggtgaccagtgcgattttgaaaataagacgaaagaagttgtgtgtgcctttactaccatctaattagcaagctctccactgtgttggcaagtctccttgtgttctaacttgctgaggtttgtgcgatcatttttttttgtactccatgaatataatgtcaaatgctttttctgcatctattagtgtgatcataagattttctttctttagcttgtatatatggtatatcatattaattaatttttaaatgtcagatcattcttacattggtaaataagaaacacagtaatcatgcagtataatttctttctaccagcataagatttaatttgttattttgagggattcttattcttgaagtaatgacaatgcattgaaaattacattgctacatagtattcttttcttattacattggcattacaataatgttgggattactttagattaaatcagaaagtatcacgctattttcatnnnnnnnnnnnnnnnnnnnnnnnnnnnnnnnnnnnnnnnnnnnnnnnnnnnnnnnnnnnnnnnnnnnnnnnnnnnnnnnnnnnnnnnnnnnnnnnnnnnnnnnnnnnnnnnnnnnnnnnnnnnnnnnnnnnnnnnnnnnnnnnnnnnnnnnnnnnnnnnnnnnnnnnnnnnnnnnnnnnnnnnnnnnnnnnnnnnnnnnnnnnnnnnnnnnnnnnnnnnnnnnnnnnnnnnnnnnnnnnnnnnnnnnnnnnnnnnnnnnnnnnnnnnnnnnnnnnnnnnnnnnnnnnnnnnnnnnnnnnnnnnnnnnnnnnnnnnnnnnnnnnnnnnnnnnnnnnnnnnnnnnnnnnnnnnnnnnnnnnnnnnnnnnnnnnnnnnnnnnnnnnnnnnnnnnnnnnnnnnnnnnnnnnnnnnnnnnnnnnnnnnnnnnnnnnnnnnnnnnnnnnnnnnnnnnnnnnnnnnnnnnnnnnnnnnnnnnnnnnnnnnnnnnnnnnnnnnnnnnnnnnnnnnnnnnnnnnnnnnnnnnnnnnnnnnnnnnnnnnnnnnnnnnnnnnnnnnnnnnnnnnnnnnnnnnnnnnnnnnnnnnnnnnnnnnnnnnnnnnnnnnnnnnnnnnnnnnnnnnnnnnnnnnnnnnnnnnnnnnnnnnnnnnnnnnnnnnnnnnnnnnnnnnnnnnnnnnnnnnnnnnnnnnnnnnnnnnnnnnnnnnnnnnnnnnnnnnnnnnnnnnnnnnnnnnnnnnnnnnnnnnnnnnnnnnnnnnnnnnnnnnnnnnnnnnnnnnnnnnnnnnnnnnnnnnnnnnnnnnnnnnnnnnnnnnnnnnnnnnnnnnnnnnnnnnnnnnnnnnnnnnnnnnnnnnnnnnnnnnnnnnnnnnnnnnnnnnnnnnnnnnnnnnnnnnnnnnnnnnnnnnnnnnnnnnnnnnnnnnnnnnnnnnnnnnnnnnnnnnnnnnnnnnnnnnnnnnnnnnnnnnnnnnnnnnnnnnnnnnnnnnnnnnnnnnnnnnnnnnnnnnnnnnnnnnnnnnnnnnnnnnnnnnnnnnnnnnnnnnnnnnnnnnnnnnnnnnnnnnnnnnnnnnnnnnnnnnnnnnnnnnnnnnnnnnnnnnnnnnnnnnnnnnnnnnnnnnnnnnnnnnnnnnnnnnnnnnnnnnnnnnnnnnnnnnnnnnnnnnnnnnnnnnnnnnnnnnnnnnnnnnnnnnnnnnnnnnnnnnnnnnnnnnnnnnnnnnnnnnnnnnnnnnnnnnnnnnnnnnnnnnnnnnnnnnnnnnnnnnnnnnnnnnnnnnnnnnnnnnnnnnnnnnnnnnnnnnnnnnnnnnnnnnnnnnnnnnnnnnnnnnnnnnnnnnnnnnnnnnnnnnnnnnnnnnnnnnnnnnnnnnnnnnnnnnnnnnnnnnnnnnnnnnnnnnnnnnnnnnnnnnnnnnnnnnnnnnnnnnnnnnnnnnnnnnnnnnnnnnnnnnnnnnnnnnnnnnnnnnnnnnnnnnnnnnnnnnnnnnnnnnnnnnnnnnnnnnnnnnnnnnnnnnnnnnnnnnnnnnnnnnnnnnnnnnnnnnnnnnnnnnnnnnnnnnnnnnnnnnnnnnnnnnnnnnnnnnnnnnnnnnnnnnnnnnnnnnnnnnnnnnnnnnnnnnnnnnnnnnnnnnnnnnnnnnnnnnnnnnnnnnnnnnnnnnnnnnnnnnnnnnnnnnnnnnnnnnnnnnnnnnnnnnnnnnnnnnnnnnnnnnnnnnnnnnnnnnnnnnnnnnnnnnnnnnnnnnnnnnnnnnnnnnnnnnnnnnnnnnnnnnnnnnnnnnnnnnnnnnnnnnnnnnnnnnnnnnnnnnnnnnnnnnnnnnnnnnnnnnnnnnnnnnnnnnnnnnnnnnnnnnnnnnnnnnnnnnnnnnnnnnnnnnnnnnnnnnnnnnnnnnnnnnnnnnnnnnnnnnnnnnnnnnnnnnnnnnnnnnnnnnnnnnnnnnnnnnnnnnnnnnnnnnnnnnnnnnnnnnnnnnnnnnnnnnnnnnnnnnnnnnnnnnnnnnnnnnnnnnnnnnnnnnnnnnnnnnnnnnnnnnnnnnnnnnnnnnnnnnnnnnnnnnnnnnnnnnnnnnnnnnnnnnnnnnnnnnnnnnnnnnnnnnnnnnnnnnnnnnnnnnnnnnnnnnnnnnnnnnnnnnnnnnnnnnnnnnnnnnnnnnnnnnnnnnnnnnnnnnnnnnnnnnnnnnnnnnnnnnnnnnnnnnnnnnnnnnnnnnnnnnnnnnnnnnnnnnnnnnnnnnnnnnnnnnnnnnnnnnnnnnnnnnnnnnnnnnnnnnnnnnnnnnnnnnnnnnnnnnnnnnnnnnnnnnnnnnnnnnnnnnnnnnnnnnnnnnnnnnnnnnnnnnnnnnnnnnnnnnnnnnnnnnnnnnnnnnnnnnnnnnnnnnnnnnnnnnnnnnnnnnnnnnnnnnnnnnnnnnnnnnnnnnnnnnnnnnnnnnnnnnnnnnnnnnnnnnnnnnnnnnnnnnnnnnnnnnnnnnnnnnnnnnnnnnnnnnnnnnnnnnnnnnnnnnnnnnnnnnnnnnnnnnnnnnnnnnnnnnnnnnnnnnnnnnnnnnnnnnnnnnnnnnnnnnnnnnnnnnnnnnnnnnnnnnnnnnnnnnnnnnnnnnnnnnnnnnnnnnnnnnnnnnnnnnnnnnnnnnnnnnnnnnnnnnnnnnnnnnnnnnnnnnnnnnnnnnnnnnnnnnnnnnnnnnnnnnnnnnnnnnnnnnnnnnnnnnnnnnnnnnnnnnnnnnnnnnnnnnnnnnnnnnnnnnnnnnnnnnnnnnnnnnnnnnnnnnnnnnnnnnnnnnnnnnnnnnnnnnnnnnnnnnnnnnnnnnnnnnnnnnnnnnnnnnnnnnnnnnnnnnnnnnnnnnnnnnnnnnnnnnnnnnnnnnnnnnnnnnnnnnnnnnnnnnnnnnnnnnnnnnnnnnnnnnnnnnnnnnnnnnnnnnnnnnnnnnnnnnnnnnnnnnnnnnnnnnnnnnnnnnnnnnnnnnnnnnnnnnnnnnnnnnnnnnnnnnnnnnnnnnnnnnnnnnnnnnnnnnnnnnnnnnnnnnnnnnnnnnnnnnnnnnnnnnnnnnnnnnnnnnnnnnnnnnnnnnnnnnnnnnnnnnnnnnnnnnnnnnnnnnnnnnnnnnnnnnnnnnnnnnnnnnnnnnnnnnnnnnnnnnnnnnnnnnnnnnnnnnnnnnnnnnnnnnnnnnnnnnnnnnnnnnnnnnnnnnnnnnnnnnnnnnnnnnnnnnnnnnnnnnnnnnnnnnnnnnnnnnnnnnnnnnnnnnnnnnnnnnnnnnnnnnnnnnnnnnnnnnnnnnnnnnnnnnnnnnnnnnnnnnnnnnnnnnnnnnnnnnnnnnnnnnnnnnnnnnnnnnnnnnnnnnnnnnnnnnnnnnnnnnnnnnnnnnnnnnnnnnnnnnnnnnnnnnnnnnnnnnnnnnnnnnnnnnnnnnnnnnnnnnnnnnnnnnnnnnnnnnnnnnnnnnnnnnnnnnnnnnnnnnnnnnnnnnnnnnnnnnnnnnnnnnnnnnnnnnnnnnnnnnnnnnnnnnnnnnnnnnnnnnnnnnnnnnnnnnnnnnnnnnnnnnnnnnnnnnnnnnnnnnnnnnnnnnnnnnnnnnnnnnnnnnnnnnnnnnnnnnnnnnnnnnnnnnnnnnnnnnnnnnnnnnnnnnnnnnnnnnnnnnnnnnnnnnnnnnnnnnnnnnnnnnnnnnnnnnnnnnnnnnnnnnnnnnnnnnnnnnnnnnnnnnnnnnnnnnnnnnnnnnnnnnnnnnnnnnnnnnnnnnnnnnnnnnnnnnnnnnnnnnnnnnnnnnnnnnnnnnnnnnnnnnnnnnnnnnnnnnnnnnnnnnnnnnnnnnnnnnnnnnnnnnnnnnnnnnnnnnnnnnnnnnnnnnnnnnnnnnnnnnnnnnnnnnnnnnnnnnnnnnnnnnnnnnnnnnnnnnnnnnnnnnnnnnnnnnnnnnnnnnnnnnnnnnnnnnnnnnnnnnnnnnnnnnnnnnnnnnnnnnnnnnnnnnnnnnnnnnnnnnnnnnnnnnnnnnnnnnnnnnnnnnnnnnnnnnnnnnnnnnnnnnnnnnnnnnnnnnnnnnnnnnnnnnnnnnnnnnnnnnnnnnnnnnnnnnnnnnnnnnnnnnnnnnnnnnnnnnnnnnnnnnnnnnnnnnnnnnnnnnnnnnnnnnnnnnnnnnnnnnnnnnnnnnnnnnnnnnnnnnnnnnnnnnnnnnnnnnnnnnnnnnnnnnnnnnnnnnnnnnnnnnnnnnnnnnnnnnnnnnnnnnnnnnnnnnnnnnnnnnnnnnnnnnnnnnnnnnnnnnnnnnnnnnnnnnnnnnnnnnnnnnnnnnnnnnnnnnnnnnnnnnnnnnnnnnnnnnnnnnnnnnnnnnnnnnnnnnnnnnnnnnnnnnnnnnnnnnnnnnnnnnnnnnnnnnnnnnnnnnnnnnnnnnnnnnnnnnnnnnnnnnnnnnnnnnnnnnnnnnnnnnnnnnnnnnnnnnnnnnnnnnnnnnnnnnnnnnnnnnnnnnnnnnnnnnnnnnnnnnnnnnnnnnnnnnnnnnnnnnnnnnnnnnnnnnnnnnnnnnnnnnnnnnnnnnnnnnnnnnnnnnnnnnnnnnnnnnnnnnnnnnnnnnnnnnnnnnnnnnnnnnnnnnnnnnnnnnnnnnnnnnnnnnnnnnnnnnnnnnnnnnnnnnnnnnnnnnnnnnnnnnnnnnnnnnnnnnnnnnnnnnnnnnnnnnnnnnnnnnnnnnnnnnnnnnnnnnnnnnnnnnnnnnnnnnnnnnnnnnnnnnnnnnnnnnnnnnnnnnnnnnnnnnnnnnnnnnnnnnnnnnnnnnnnnnnnnnnnnnnnnnnnnnnnnnnnnnnnnnnnnnnnnnnnnnnnnnnnnnnnnnnnnnnnnnnnnnnnnnnnnnnnnnnnnnnnnnnnnnnnnnnnnnnnnnnnnnnnnnnnnnnnnnnnnnnnnnnnnnnnnnnnnnnnnnnnnnnnnnnnnnnnnnnnnnnnnnnnnnnnnnnnnnnnnnnnnnnnnnnnnnnnnnnnnnnnnnnnnnnnnnnnnnnnnnnnnnnnnnnnnnnnnnnnnnnnnnnnnnnnnnnnnnnnnnnnnnnnnnnnnnnnnnnnnnnnnnnnnnnnnnnnnnnnnnnnnnnnnnnnnnnnnnnnnnnnnnnnnnnnnnnnnnnnnnnnnnnnnnnnnnnnnnnnnnnnnnnnnnnnnnnnnnnnnnnnnnnnnnnnnnnnnnnnnnnnnnnnnnnnnnnnnnnnnnnnnnnnnnnnnnnnnnnnnnnnnnnnnnnnnnnnnnnnnnnnnnnnnnnnnnnnnnnnnnnnnnnnnnnnnnnnnnnnnnnnnnnnnnnnnnnnnnnnnnnnnnnnnnnnnnnnnnnnnnnnnnnnnnnnnnnnnnnnnnnnnnnnnnnnnnnnnnnnnnnnnnnnnnnnnnnnnnnnnnnnnnnnnnnnnnnnnnnnnnnnnnnnnnnnnnnnnnnnnnnnnnnnnnnnnnnnnnnnnnnnnnnnnnnnnnnnnnnnnnnnnnnnnnnnnnnnnnnnnnnnnnnnnnnnnnnnnnnnnnnnnnnnnnnnnnnnnnnnnnnnnnnnnnnnnnnnnnnnnnnnnnnnnnnnnnnnnnnnnnnnnnnnnnnnnnnnnnnnnnnnnnnnnnnnnnnnnnnnnnnnnnnnnnnnnnnnnnnnnnnnnnnnnnnnnnnnnnnnnnnnnnnnnnnnnnnnnnnnnnnnnnnnnnnnnnnnnnnnnnnnnnnnnnnnnnnnnnnnnnnnnnnnnnnnnnnnnnnnnnnnnnnnnnnnnnnnnnnnnnnnnnnnnnnnnnnnnnnnnnnnnnnnnnnnnnnnnnnnnnnnnnnnnnnnnnnnnnnnnnnnnnnnnnnnnnnnnnnnnnnnnnnnnnnnnnnnnnnnnnnnnnnnnnnnnnnnnnnnnnnnnnnnnnnnnnnnnnnnnnnnnnnnnnnnnnnnnnnnnnnnnnnnnnnnnnnnnnnnnnnnnnnnnnnnnnnnnnnnnnnnnnnnnnnnnnnnnnnnnnnnnnnnnnnnnnnnnnnnnnnnnnnnnnnnnnnnnnnnnnnnnnnnnnnnnnnnnnnnnnnnnnnnnnnnnnnnnnnnnnnnnnnnnnnnnnnnnnnnnnnnnnnnnnnnnnnnnnnnnnnnnnnnnnnnnnnnnnnnnnnnnnnnnnnnnnnnnnnnnnnnnnnnnnnnnnnnnnnnnnnnnnnnnnnnnnnnnnnnnnnnnnnnnnnnnnnnnnnnnnnnnnnnnnnnnnnnnnnnnnnnnnnnnnnnnnnnnnnnnnnnnnnnnnnnnnnnnnnnnnnnnnnnnnnnnnnnnnnnnnnnnnnnnnnnnnnnnnnnnnnnnnnnnnnnnnnnnnnnnnnnnnnnnnnnnnnnnnnnnnnnnnnnnnnnnnnnnnnnnnnnnnnnnnnnnnnnnnnnnnnnnnnnnnnnnnnnnnnnnnnnnnnnnnnnnnnnnnnnnnnnnnnnnnnnnnnnnnnnnnnnnnnnnnnnnnnnnnnnnnnnnnnnnnnnnnnnnnnnnnnnnnnnnnnnnnnnnnnnnnnnnnnnnnnnnnnnnnnnnnnnnnnnnnnnnnnnnnnnnnnnnnnnnnnnnnnnnnnnnnnnnnnnnnnnnnnnnnnnnnnnnnnnnnnnnnnnnnnnnnnnnnnnnnnnnnnnnnnnnnnnnnnnnnnnnnnnnnnnnnnnnnnnnnnnnnnnnnnnnnnnnnnnnnnnnnnnnnnnnnnnnnnnnnnnnnnnnnnnnnnnnnnnnnnnnnnnnnnnnnnnnnnnnnnnnnnnnnnnnnnnnnnnnnnnnnnnnnnnnnnnnnnnnnnnnnnnnnnnnnnnnnnnnnnnnnnnnnnnnnnnnnnnnnnnnnnnnnnnnnnnnnnnnnnnnnnnnnnnnnnnnnnnnnnnnnnnnnnnnnnnnnnnnnnnnnnnnnnnnnnnnnnnnnnnnnnnnnnnnnnnnnnnnnnnnnnnnnnnnnnnnnnnnnnnnnnnnnnnnnnnnnnnnnnnnnnnnnnnnnnnnnnnnnnnnnnnnnnnnnnnnnnnnnnnnnnnnnnnnnnnnnnnnnnnnnnnnnnnnnnnnnnnnnnnnnnnnnnnnnnnnnnnnnnnnnnnnnnnnnnnnnnnnnnnnnnnnnnnnnnnnnnnnnnnnnnnnnnnnnnnnnnnnnnnnnnnnnnnnnnnnnnnnnnnnnnnnnnnnnnnnnnnnnnnnnnnnnnnnnnnnnnnnnnnnnnnnnnnnnnnnnnnnnnnnnnnnnnnnnnnnnnnnnnnnnnnnnnnnnnnnnnnnnnnnnnnnnnnnnnnnnnnnnnnnnnnnnnnnnnnnnnnnnnnnnnnnnnnnnnnnnnnnnnnnnnnnnnnnnnnnnnnnnnnnnnnnnnnnnnnnnnnnnnnnnnnnnnnnnnnnnnnnnnnnnnnnnnnnnnnnnnnnnnnnnnnnnnnnnnnnnnnnnnnnnnnnnnnnnnnnnnnnnnnnnnnnnnnnnnnnnnnnnnnnnnnnnnnnnnnnnnnnnnnnnnnnnnnnnnnnnnnnnnnnnnnnnnnnnnnnnnnnnnnnnnnnnnnnnnnnnnnnnnnnnnnnnnnnnnnnnnnnnnnnnnnnnnnnnnnnnnnnnnnnnnnnnnnnnnnnnnnnnnnnnnnnnnnnnnnnnnnnnnnnnnnnnnnnnnnnnnnnnnnnnnnnnnnnnnnnnnnnnnnnnnnnnnnnnnnnnnnnnnnnnnnnnnnnnnnnnnnnnnnnnnnnnnnnnnnnnnnnnnnnnnnnnnnnnnnnnnnnnnnnnnnnnnnnnnnnnnnnnnnnnnnnnnnnnnnnnnnnnnnnnnnnnnnnnnnnnnnnnnnnnnnnnnnnnnnnnnnnnnnnnnnnnnnnnnnnnnnnnnnnnnnnnnnnnnnnnnnnnnnnnnnnnnnnnnnnnnnnnnnnnnnnnnnnnnnnnnnnnnnnnnnnnnnnnnnnnnnnnnnnnnnnnnnnnnnnnnnnnnnnnnnnnnnnnnnnnnnnnnnnnnnnnnnnnnnnnnnnnnnnnnnnnnnnnnnnnnnnnnnnnnnnnnnnnnnnnnnnnnnnnnnnnnnnnnnnnnncccactccccctttttggccctggcgttcccctgtactggggcatataaagtttgcgtgtcaaatgggcctctctttccagtgatggccagctaggccatcttttgatacatatgcagctagagtcaagagctccggggtactggttagttcataatgttgttccacctatagggttgcagatccctttagctccttgggtactttctctagctcctccattgggagccctgtgatccatccattagctgactgtgggcatccacttctgtgtttgctaggccccggcatagtctcacaagagacagctacatctgggtcctttcgataaaatcttgctagtgtatgcaatggtgtcagcgtttggatgctgattatggggtggatccctggataaggcagtctctacatggtccatcctttcatctcagctccaaactttgtctctgtaactccttccaagggtgttttgttcccacttctaaggaggggcatagtgtccaccctgaagtttaaaatgtatcaatttctcctaattttatatgcaatatgaatatattgcagaaaattagaaaatgtgagaaaatgaaggaaaagtaataaacataccctttaattttggtgctagggctattttacatcatccatatgtgatatatcttttcatattattttctaggtacagtgaatatccacccacaggtagtcacacgaattaacacaacagactaaagttcatttctgtgtacttgcctgtgtcagtaaatatactgacacatactactattcaacatactattttatctttctttatttctcatgtgcataccccatagttattaaatctatcttgataatggtcagtgatataatttctattataattaatcttttaaataaatactttatttttacttctgattattaacaccttcattgtctagaaaatgttggatcaaaaataaaaatgtttttaaagatttttgtttgttttaagtcagggtcttattatgtacttcaagctagttttgaacctttggtcttctggcctcaacctttttaatactgaatttttctctctctttctgtgtgtgcacacacacgtgtgtgtgtgtgtgttttgtgatggtgaggatcaaacctagtttttggatcctagtttactaccctaccataaatcatatccccagaccttaatacattttttgctatatatttctagatcaagttttgttgtgtctctgccatttttacattactactaaggacttgtgagggaccaaccaagctgccttttttgaagacagaaattaaactgtctatcttcttcttgtatttgtgaattaatagcttcatcagaacaggacttaatataacaaattgtacctgtaatatagcaaattgagtgcaatttaatgattgttcgtattcttgtatcataaaataaagtttaaaaatactttaaaatagagcacgctaattaaacttacaatttaaccagaacctcagagagtagagatgtctgagacagagagcagagttaactgctatcagagtactgcaggcgggtgtggaacaccaggtgtacagcactgcaggcaggtggagaccaccaggtgttcagcactgcagcaggtatggaccaccaggtgaatgattcatcagatgtgccattagggcatcagtcttgaatcttatttagtattggtttagaaatggtggtaagtaaatatgcctgggattgatgaatcagaaaacctccagcattaagatgatgactatgatttgcagataacaataacatacacaaaaatctagtagaatcaaatgaacaaaaagttgagaactttcttaagtaagcaagttttgtaagatgctaagttgcaaaaagtataaatcaataacatatataaacacatgtttataaatataaagttataaactaacttctaactgtttagtatatatttggattgcatattgaatgtttacctgacttgatcatgtatgtatatgtgacatgaatggacgaatataaatgcataaggaaacaaaaggagcttgagagagggatggggtgaacaagaggttagggggtgatataatagatggtaataggaaagaaagtaagtacattttcaaagaaccacaaaataaaccgaaaaattcctaaaaaataaaaagctatattgaatattttaataaaaattgaatattgtaaatatattgattctgaattattttgtttggctcaatggtaaacataatttatgtattatagtagaaatcatggtaatcttggtccttgagaaaatacctgtaaagttcattttgagaaataacagaaccaccacaacctgagacatcccaggaaatacacagcaacggagcagctgatcaccagcttgtctgttcctctgaagacaccacaacttgaaggcatcccaggagttcctctgtacacagggcaactgggccacctacaccagtctgaagacctcctgggggtacagctcgccagagttctgtcgcacagagggaaacagaaaccagagtctataggccctcccagagaacagattcacacagaacagcagcttgactgctcctctcaagacaggacagtctgaaggcctcccaggagatctgctgcagccaaagtgacagatcagtagcttctctacctgtctgaagaccccacagtcggaaggcctcacaggaggtctgctacagtcagggccacaggcctaccaggatacctgaagcaacccatggacaaaagaggcatactccagagtcacccagaccagcaaataccagggataaccagatgtcaagaggcaagtgcaacaccataagcaacggcagccagtatatgtgggcatcatcaaaacccagtcctctcaccacggcaagccccgaatacaccaacacacctggaaaagcaggaagccaaactaaaatcttatctcatgaagataatagagtagagtcctttaaggaggatataaataactcattgaaagaaatacaataaaacacaggtaagcaggtaaaagcccttaaagaggaaacaaataaatacccaagatataagatacaatttgtaaaacacatgaaactcaagaagaacgacgaccaaagtgtggacactttgccccttcttagaattggaacaaaacacccatggaaggagttatagagacaaagtttggagctgagacaaaaggatcgaccagctagagactgccatacccggggatctattctataatcagcctccaaacgctgacatcattgcatacactagcaagattttgctgaaaggaccctgatatagctgtctcttggaggctattcttgggcctagcaaacacagaagtggatgctcacagtcagctattggatggaacacagggcccccaatggagtagctagagaaagtacccaaggagctaaagagatctgcaaccctacaggtggaacaacaatataaactaaccagtaccctccggagctcgtgtctctagctgcatatgtatcagaagatggcctagttggccatcagtggaaagagaggcccattggtcttgcaaactttatatgcctaagtacaggggaacgccagggccaagaagtgggggaaggaggaaagtggtggggggaggacttgggggacttttgggatagcattggaaatgtaaatgaagaaaatacctaattttaaaaaaggaaaaaaaaaaagaaatgcagaaaaacatacaatcaaacaggtgaaggaattgaataaagtgctccaagaactaaatgtggaagtagaaacaataaagaaaacacaaatggaggcaaacctggaaatggaaaacctaggaaagaggtcaggaattctgttgatgatataagtatcatcaacaaaatacaagagatagaagaaagaatctcaggtgtagaagatattgtagaagagattgacacaattgtcaaagaaaattcaaaatgtaaaaaactcctaaccctaaccatccaggaaattcagaacacaatgaaaagaccaaatctaagaataattggaatagaggagatcaaagattcccagctcaaaggacctgaaaataccttcaacaaagttgtaaaaaagaagcttccccaacctaaagaaagagatgaccataaatgtacaagaagcctatagaacaccaaataaatgtgaccagaaaagaaaatcttatcacataacaatcaaaacactaaatgcacagaacaaagaggtaatgttaaaagctgcaagggaaaagtgtcaagtaacttataaagcagaccaatcagaattatagcagacttcttaacagagacactaaaagccagaagagcatgggcagaggtcatgaagactctaagagaacaaaaatgccagcccaggttactataccgagcaaaactctcaaccagcatagatggagaaataaaaatattccaagcccaaatcaaattcaaacagtatctatgtaccaatccatccatacagaggattctacaagaaaaattccaacacaaggagggtacctacaccaaaggaaagacaagatattaagcatctcacaacaaagccaaaaggagagaaccacatgctcatagagccacatacaaaaacaggaactaacagccacatacataacaggaactaacagtcatctgtctttaatatttctcaatattagtggactcaactcacctataaaaagacataagctaacagactgaatacacaaacaggattcagcattttgctgaatacaggaaacataaacatagacactatcttactgtaaaaagaatggaagaaggtcttccaagcaaatggtcccaataaacaacctggggttgccattctaatattcaataaaatagactttcaaccaaaaattatcaagcatgatgtagaaggatacttcatgttcatcaaagggaaaatccaccaagagaaagtctcaattctgaacatctatgccaaaaatgcaagagcatccacatttataaaagaaactgtactaaagctcaaaacacagtaaaccccacacaataatagttggagacttcaacactccactctcactagtggacaggtcattgaaacaaaaagtaaacagagacacagtgaaactaatagaagttatcaactaaatggatttcatagatatctacaggacatttcatcctaaaacagaagaatacaccttctcagcaccacatgataccttttcaaaaatcaacaatctaattggtcacaaaacaaccctcaactgatataagaagactgaaaaaattccatgcatcctataggatcaccaccatggcctaaggctggtcttcaacaacagcaaaaacaacagaaagcacacatatatgtagaaactaaacaactctctacttaatgataacttggtcagggaagaaataaagaaagaaattaaagactttgtggaatttaatgaaaatattgacaaacccaaacttatgggacacaataaaagcaatgctaagaggaaaatttatagcactaagttccctggtaaagaaactggaatgacactagcaacttcacagcacacctgagagctctagaaccaaaagaagcaaactcacccaacaggagtagaaggcaggaaacagtcaaactcagggctgaagtcaaccaaatagaaacaaagagaacaatacaaaaaaaaaaaaaatcaacaaaaccaaaagcttgttctttgcaagaatcaacaagataaataacccaccagccaaactaactaaagggcccagaggcagtacctaaattaacaaaatcagaaatgaaaaggaagacatacaacaaaaatggaagaaatttaaaaaatcatcagatcctactataaatgcctatactcaacaaaactggaaaatctagttgaaatggatagttttctagacagatactaaataccacagttaaaccaagagcaggtaaaccatctcaatgggtccatatcccataaagaaatagaaaaagtcattaaaacctcccaaccaaaaagtccagggccagatggctttagtgagaattctatcagactttcaaagaaaacctgtcttagtcagggtttctattcctgcacaaacatcataaccaagaaacaagttggggaggaaagggtttattcagcttacatttccacactgctgttatcaccaaagaaaatcaggactggaactcaaacaggccagaaagcaggagctgatgcagagaccatggagggatgttacttactggcttgcttccgctggcttgcttagcctgctctcttatagaaccaagtttaccagcccagagatggtcccacccacaaggggcctttcccccttgatcactaattgagaaaatgccttacagttgtatctcatggaggcatttccccaactgaatctcctttttctgtgataactccagctgtgtcaagttgacacaaaactagccagtataaaacccaataccaatattcttcaaactataacattaaatagaaacaaaaggaacactacctaattcattctatgaagccacaattactttgatacctaaaccacacaaagacccaacaaaaaaagagaacttcagaccgatctcacttatgaatattgatacaaaaatattcaataaaattcttgcaaacaaaatccaagaacacatcaacatcataattctccaaaatcaagtaggcttcattccagggatgcaaggttggttcaatatatgaaaatccattaacttaatctactatataaataaactcaaagaaaaaagtcacatgatcatctccttagatgcagaaaaagcatttcacaaaatacaacaccccttaatgttaaaagtattggacagaccaggaattcaattctacctaaacataataaaagcaatttactgaaaaccaacagccaatatcgaattaagtggagagatacttgaagcaatcccaataaaatcggggacaagacaaggatgttcactctcctcgtatctattcagtatagtacttgaagtgctagctagaacaatttagacagccaaaagagatcaaggggatacaaattggcaaagaagaaataaaggtatcactatttgccgataatatgatagtatacataaaagacccccaaaattctaccagacaacttctccagctgataaaccccttcagcaaaatgcccagatataaaattagctcaagtaaatcagtggccttcctttatacaagtgataaacaggctgagaaagaaattagggacaaaactcccttacaatagccacacataatataaaatatcttggggtaactctaaccaaatgagtgaaaaatttgtatgacaataatttcaagtttctcaagaaagaattcgaagaagatctcagaaaatggagagatcttccatgctcatggattggcacaactaacacaataaaaatagccaaactaccaaaggcaatctatagattcaatgcagtgcctattaaaatcacaacacaattcttcaaagacatggaaagagcaattctcaaatgtatctggaaaggcaaaaaactctgaatagtgaaaacaattttttattagaaattttctttatttacattttaaatgttatcccctttcctcttctctcctctgaaaattccctatcctgtccccactccacctgctccccaacccacatactcccattcctggctctggcattctcctatactggggcatagaacctattgagaacaattcttaacaataaaagaatggctgggggaaaccaccatccgtgacctcaacctatactgcagaacaatattgataaaaacttcatggtattggtacagagacagacatgttgatcagtggaatagaattgaagacccagaaatgatccaacacatctacagtcacttgatctttgacaaagaagccaaaaatatataatggataaaagaaagcatcttcaataaatggagctcatctaactggctgtgtgtatgtagaaaatgaaaatagacccatatttgtcactttgcccaaagcttgagtgcaagtacatggaggacctcaaaaaaacaccagatacaccgaatctaatagaagagaaagtgggaatgaactttgaactcattggcacagggggcaatttcctaaacagaactccaatggcaaacacatgtaagatcaagaattgataaatgggaccccatgaactggaaagcttctagaaggcaaaggacatagtcaataggacaaattggcaacctatagattgggaaaaatcttaagtaaccccacatctggtagagggctaataatatccaaaatatataaagaactcaagaagctacgcacaaaaaaaccaaacaacccaatcaaaaaatggggtatagaactaaagagaattcacaacaaaggagtcttaaatggctgataagcacctaaagaaatgttcaaagtcactagtgatcagggaaatgcaaatcaaaatgacccttagattccaccctacaccaatcagtattgctaagtttaaaatcccaggtgacagcacatgttggaaaggatgtggaaaaagaggaacactcttccaatgctggtggggttacaaactggtacaaccactctggaaattaatcttgaggctcctcagaaaaatgaaaataggtctacctgaagacccagctataccactcatgggaatatacccaaaagatgccccagaggggcatgtgttccactatgttcagagtgactttgtgatagccagaagctggaaacaacccagatatcctgcaacagaagaatgaatacagaaaatgtggctcatttacacaatggaatactactcagctcttaagaatgaggacatcctgagttttgcaggcaaatggaactggaaaatatcgtcctaagtgagataactcaaacttaaaaggagatgtatggtatgtattcactaataagtagataataactaaaaattatagaatacccaagatacagtccacaggattcaaaaagttcaacaagctgaagggcccaagtgaggacacctcaattccacttggaaggcagaagaaagcaatcacgaagtgggggaggcagggagggacctgtgtgggaaagtgtatggggtagggataaaggggattatgatctggtattatgtgggggaaaaggactgaagccctgagggccagcagaaagaatagaaacaggcaacctcaggaggttggaggtttgggggaccctccagaatgtacaagagacctaggaggtgagagactctcaggattcaaaaggagggatcttagatgaaatactgtacaatggggagagggaacttgtcgagcctacctccagcagaaaacagggcatcaagtgagggaatggggttgccatcccagtcaaaactctgactcataattgtttctgtctcaaagaactgcagggatggatatgcagaagagcctgaggaaaaggaggtctagtgactggcccaaagtgggacctagctgaaggggagattctgacactattattgagtctatggagctctcacaaaagggacctaccatgactgtcctcctaaagacccaagaaacagctgaaagagtcagatgcagctatctgcgcccaaccagtggatagaatctgattacccctgtggttaaattattggaaagctggaagaagctgaggaggtgggaggctctgaaggaggaaacacagtctcaattaacctggacctcttagatctctcagatagtggaccaccaaccaggcagcatataccagctgacatgaggctcctaacacatatacagcagaggactgttgggtctggcttagtcagagaagatgcacctaaccctcaagattctggaggccccagggagtttatgggtctggtggcatggggtgtggggacatcatggagatagtggggcgggaaggaggtatgggatggggtcagtcagaaggtggaccaggaggggaataaaatctggagtgtaaaattttaaaaaattaaattaaaaaaatttaaaaggaaaataaaagataaaaatatttaaatatttttcaaaatgtaatgctggggaattatttttctatctatataccaaaacagttataaactctattatatattatgcaaacagaacattgctttggtggtgaagaagtaatatgtttattatattgagtctttttatttataaacaaagtgtatctcttacaaacaactcagaaaaagtttgtcaagttgaatcatcaactctccattacacagcaagaaaaaaagaaaagaaaagaaagaaatgaaaataacatttaggtaagactaagtctattttaaatagcttccagattacaaattataatagtgattataactaaaatataaaacaaaatgaaaccaataaagcttaccttaatgggacagatatgtagtctcacctttactagtatctgaggtggagatcatcaaagtcaaggtcttcctgggcttcagatagagctcaagtcttgcctgaaatcttagctagacactttcacaaaatagaaaatgggaaaatggggctgagggtgtgaattaaattagtggtaaagcagttggtttgggtctgtgcagctctaggttaagtttctacagacacacaaacacactattaacaatgaaattaactgaggaatgaaggatggacagaaataattcaaatggtttttactaacatggaatctagtttgtactcactggtgtaagttaacactctgacattaaatccatcaatagattgatgaatataatagattgcctagcccttttgagattatttgataaatttcaaattgtacttgtcagtcaactaccaaatgttcactttgcatatgtgcagagcttgtgattaggactgagttgtacttgtctatgcctgggtccagcctttctagagtggtaatttacagaagggccttctgtacatgttagagtaaattctaaagcaatactagctttagaatttttattagaacaagataacacaatcaactaaaattccagatgcatatatcgtaagcgatgacgaatgttgcattgtgttattcagccattaaaagttttatgtgtgaaaaattcttaaagcattaggtttaatcatgggttgagaggcaacctatacaagtaaattatatagttgggtttcagtgttttgaaaaatctttttgtctatacagaaagattcaaagtgtatggcaaaaaatgaagaggctcagatcttcatttctagtgaagatatgagtgattttattttgaattaactaaagttttatagctaatatatctgcatagtgaatactaaagacatttgcttcctccctacaagctgagaaaaaaaaaaaagaaagaaaagaaaaggtctgagtgaacttgtggctaagttcttgatctcaccagtttcatcatctcctgggttgggaaacgtttcattggaactcactgtccaccttgatacatgtcacagcaggtatgcaacagttgcctgatcttaccatgattacctgctaaaaaacacacaggcacctgtcattaaattcagctttcacttagtttcattcacttggtttcaattttcgtccttaattttgtctttttgaaataattggtcctttattcttaggtttgatggtgtagttttggtattttctgtcatctttgtttgtaagtgacttttttttcaagataaattttctccatgtagccctggctgtcgtggaagggaacacactctgagagcagagatccacctgcctctgcctatgtattgctgcgattaatgccacgcaccactactgccaggctgtaagtgaaatgtttcctaggaatttgacaagggctactaaactgtcaaaaaccttattacttatgactcataggcagaaagcatagaaaaagcctgagttgtttaccttcctgtgtaaatgcctttccttttgatttatttatttatatgtttatttattatttctagagttgaaattagcttccaggaaacactaaaattgtaccttcaaacactaaaaacatgtaaaacagtgtaaactggctacacattaataaagaacacacacacacacacttgtaatatatgaaggtagctgccgcagtactataaaaagctgtacataaacgtaaacgtttagtctaagacgctgacagttggctataaaatgtcacttttcctcagttatgatctgatgcagaaatagtaacaatacaagtagaaacttgcacccatctaatgtcagtatttaaaatacatatcctgcactggtcacttgtatacagaaagctcacttcatccaaagggaacaaaaataactacacaggatgaagagtgggaggcaagaaaacagggctagcatatttcaatgagcaatgctcacaggctcagaagaccttcaacaatcaacagtcccagggtaagggatggaaaacagggagggataagttgaaggtttaactggaggccgggttagtggattagtgtgaggagttagtgaattggaaagccatatgtccagaggaagcctggctatgatctgggctaaattgtttcttaggtgacctgaagaaaatattcagaggccagtaaatgtgtttccagataagctaaatggggcagcacaggttgcagaagcttgaaagtatctgctctggtgggaattttgaatccatgttgtatggaccggaaggactatggtgggggcagtaggttcctttttcggggtggggggtggatttaggaggggtaaagacattggttttatgttgcaaatcaaatgatttaaatcataatctgcaaagtctatttcaaacttatgcttacctcggaaaattaaatctctctacatttgagttgaaagtaaactgattttaattgtttttgcataactgtgggtaacagatttaaagaaagaaaggaaaagccactgagtacatggcaagaatcagcaaacacatcaaataaagcaacatgctccccagaaacaccatggcatatgctgacagttacaaaagaatggctgctgttttcatccttcacaccagaataattttttcagtacttacctcccatgtgtagagagggaaacatatggggctttacataatcataagcacaaacaggtggctacttaggtacatttaatttgcaggcaacatcaatactgaacaacacaaccagccccacatggctcccaaaaatcttgccatgaacattccattagcaaattaagatcattaaaacagagggaggagcgctcccacctccaccccctaatggcttcaactacttttcagaataaaatatgttttcaaaaacaccttgacattttgtggcatcttttgttcagggcaacttgggtgactgtgtataatgtataccttgtgaatagctgcaagtagcacatgtgcatttaaatgtgcatacatctttatgctctctaccattcctatttatgacagaaaattatggtaggtaaattttccagccctttatcaaaccataggttcagatccctgtaagcaacttggaaatacttctccaaaggtgggccacataaacatgtcacccgaggcttgcttctattttcaaacactggtaaagtctggaaattattattactgggaaaatttgctctctctatgctaggggctgagtggcagcttctgttttttgtctattggacccagcctgggaaatttagtgtgctttagttggcactgaacttctagtgatattacaagatctgaccttacaatcagccttcaatggctttgaaccacagagtgaaaaaaatacaagagaaagagtaaccactgtttctttgttaacaatgctacctgttttagtttaagtatcataataaccttataacgtaggtgatatcgtctcccttactttttagaagaggacaatgtatcaccaagggtttccattctcacacatactgnnnnnnnnnnnnnnnnnnnnattggacccagcctgggaaatttagtgtgctttagttggcactgaacttctagtgatattacaagatctgaccttacaatcagccttcaatggctttgaaccacagagtgaaaaaaatacaagagaaagagtaaccactgtttctttgttaacaatgctacctgttttagtttaagtatcataataaccttataacgtaggtgatatcgtctcccttactttttagaagaggacaatgtatcaccaagggtttccattctcacacatactgaagaaagggctgggctagacctgaaccccagttttcagaactagccatccctacctgaaaaccctagctcttattgtccatgaacttaagattctagtgcccaaagtccatcaatctatggcattttgaagaccctccaacaaaacttagagttatattctgaggcatggatgttctatggaaattctgtcctgtcctgaaaaagataggcccgtgtggattgagaagacatcaggagttatgttctcacaaagttgtttctgaattcaggtttgttactcactcctatcttaccactaggaaagagaatgttaacatagacaagtctatatgctacccttattacaacagacccttagttatgggagtcagcttatattatctgaactgacattatgaattgtattggtggctaaacatctcacacttattggacaatgtccttccaaagaggttaaatgcctctgagaaagagatagtttttggtggtgtccatttaccgcaatgcaacagttgaaccaaagaaatgaaaatgaattgggaggtttttttttaatctattctctacctctggataaaagacctattaaaaaactttatattgtcattgcagaccatcttatgtcatgtaatgatgcatggacataggatttctacagtcaggcttaatcttacaggcttcatcttactgacctgttcaactgaacttccatgtgacacacttggacttgctcctccttccttattgggttcttcttgagactttctgcagctggtctagtcaagaggatgggaatcaatcgtgaagaattttctatgaaaattgtagactccatcataggatcatggtgttccacttttgttctggattaggaaatctggggaagattagcatgtttcggtcactatgtgctcccgcatttatgtaaggaccttaagcattttgttttataagataatccatgtacacagttataacctgagcttgaccatagattcatatgctagaagttctacaaaaacaccatatttgtggactctttgtaaaagttttctcgaaaaaccaaaaagaaaaagttttcatagggatacacagatctactacaaaatgtcttagagatgcaacagattgatagaaaaacagcaagatgtgtgtgaagtgagaggtcttagagactaatactgaataatatggatgtttaggaatttgattgtaaatcaaaccatctttactgattatctaagggagcccctgctttactgattgtgagacaagattcacagaaatctaaaactggacagtttaactacaagccagctctttcacatgtatcatccctttaaaaaaatttaaatacacttctaacacacacacacacacacacacacacacacacacacgcacgcacgcacgcacacacacacacacacacacactttggtggtaaaaagccacagccaatggcatctctttctcagaggcacttgaattctctagaaggacattctacaacagacttgagacacttacccaacactttaattcataannnnnnnnnnnnnnnnnnnncataaacatgtcacccgagcttgcttctattttcaaacactgggtaaagtctggaaattattattactgggaaaatttgctctctctatgctaggggctgagtggcagcttctgttttttgtctattggacccagcctgggaaatttagtgtgctttagttggcactgaacttctagtgatattacaagatctgaccttacaatcagccttcaatggctttgaatcacagagtgaaaaaaatacaagagaaagagtaaccactgtttctttgttaacaatgctacctgttttagtttaagtatcataataaccttataacgtaggtgatatcgtctcccttactttttagaagagggcaatgtatcaccaagggtttccattctcacacatactgaagaaagggctgggctagacctgaaccccagttttcagaactagccatccctacctgaaaaccctagctcttattgtccatgaacttaagattctagtgcccaaagtccatcaatctatggcattttgaagaccctccaacaaaacttagagttatattctgaggcatggatgttctatggaaattctgtccagtcctgaagtctccatgtgtctttccatgacataaaagataggcctgtgtggattgagaagacatcaggagttatgttctcaaaagtgtttctgaattcaggtttgttactcactcctatcttaccactaggaaagagaatgttaacatagacaagtctatatgctacccttattacaacagacccttagttatgggtgtcagcttatattatctgaactgacattatgaattgtattggtagctaaacatctcacacttattggacaatgtccttccaaagaggttaaatgcctctgagaaagatagtttttggtggtgtccatttaccgcatgcaacagttgaaccaaagaaatgacaatgaattgggaggtttatttatttatttatttatttattttcccattttttattaggtatttagctcatttacatttccaatgctatcccaaaaagtcccccatatccacccacccccactcccctgcccacccactccccctttttggccctggtgttcccctgtactggggcatataaagtttgcaagtccaatgggcctctctttccagggatggccgactaggccatcttttgatatatatgcagctagagtcaagagctccggggtactggttagttcataatgttgttccacctatagggttgcagatccctttagctccttggctactttctctagctcctccattgggagccctatgatccatccattagctgactgtgagcatccacttctgtgtttgctaggccccggcatagtctcacaagagacagatacatctgggtcctttcaataaaatcttgctagtgtatgcaatggtgtcagcgtttggatgctgattatggggtggatccctggnnnnnnnnnnnnnnnnnnnntacacacacacacacacacacacacacacacacacacacacacgtgaagatatatataaaagaattcttttagaaaaaaatttacctgcttctattcgtatatattggatttacttgtatgtcaggggtaaatgtttctttatattaacagtatataaaatcaatatttatatttcagagtattaaggaaatttcagccacttatttcattattctaccttataatgtggctgaagaaaaacttacgtgtgagtagaaatgtcagctctgcctctctggttggctttgttcctatgggttggtgttggtattattttcagtgcatggttcttgcagggcatatgtaaaggtattcagctatttaacgaggattgctgtatttggaacctataatcatatatgtaaaaaatctgcttaaatatggctagcaacctaccgcacactgaatgtacatgaacttggttggtcagtactggtgcttcaccctgctttatatatcactacagttgagccagaatactacctcgtactaggggagccagacaatgctttaaaaatcattttcttctcctgatttgaaaattatctttcacagctcgatgtcttcctacaccccaaagggaagttagataccaacatggaaacaactcttgtcaacttttgaaaggcttggcagcttaagattcataataataatgaaaagttgaaatgtgtatctgtgattaagtcattgtacttctgaaagccaaaaacattactatgtgtctatgagttgatgataagagaagatttattcaaaaattcacaaatttatttacgaaacattcatgttttatcaatgtaaacagtcttacattgctactttgaaagtgaaattgtatcatgcatgcaaattgatgaccatgatgagctgttaacaagttaacatctctaatactgcagatatgagatgatgaagaaaagtagcaaaatttcatttcaaaattatttattttagagatggagggaataaatttagttgaagctaggaaagaagcttgaccattagattaaaataaaaagaatatgaatgttttcatgtggtatattcagtgtcatgctctgatctattatgaggaaatacaacttttaaattcattttatatttgttgaaacttgattatagagaagagaaaatggtagaaaactgtctgatgagaataaattctggacagataactgagtgtttttctctccctgggtttgggtgaggctggtctgtgcaaagggaatgtcgcccgatagagctgcacacatgcctaagactcagaataaacacactattcttgtgaacaatatctttgtaagtcacatgtgtaacagggagacagattggattggtggctaagtgcagagtcacaactctggttagagattttggggccatgattaggctgtgaaaattgaaaaagttttccttgtttcccagtaacattttttatttactgctcccacaagataattgtgaagataaatgtcatatatgaaaaaaaatgctcagacttgtatatctctctttaaaaagtttcacttgttagtgttttgaaaatcattaagagctggttgaaggctgacaaggtgactcagtgtgtactggcaattgttgccaagtctgatcacatggctttgatccatagtacacacatcatagaagaaaagaactgactggctcaagtgcccccagccacacatgtcatggcattggtcttctcatacatataagtacatataaatataatagaaaattataagttataactctatcaagtgtaaaagatttgaaagaataaattcacctattaactagtttcaacacttatttcattttcttatgttatattttcaagttgcatgtttgtttcttaaaataaaactcttaatttatgagtaacagtaacaaccaagaagatggctcagcagggaatttcactagtcatcaaacatgataacctgagtctctggggtccacatggtaaaaagttaaaaacctatctgctgtgggttacctgctaacttccacatggcatgtgtgtcacacacacatgaacataccataagtaaatatatatgaagaataaatcacacacattattaggaaaaagcatgtccataaaaggcctctaattatgactatatcacaaccatatccctaaacagattgaaaagattgtatttataattaaacacacacacacacacacacacacacacacacacacacacacgcatcatatgcttatacctgcacaaaaatcagtccaatcacgctggacattggtggcgcacacctttaatcccaggaggcagaggcaggcagatttctgagttcaagtccagcctggtctacagagtgagttccaggacagccagggctacacagaaaaaccctgtctcgaaaaaaaccaaaaaaagaaaaaataaaaaagaatcagtccaatgaataatctaaggtaagttccataaagctttgtgaggagcactgatatactaggatacagtatgtcataatttattaatgtgtgttttcccccaagaactctgtaagagaagaaaaatgggagattgtacatgtcaaattctcctttggagagtcataaggcttcaaatgtagctaagaattctgacattaattagaacaatgaaattgttgttcattatggtaaagtttccacaacatgaaatacattttaaagcaaatggttcaactatatttagtacattcaccctctagttgcagctgtacagcttttcaatcaaaatctgatcaaatccatttagttctgggaaatgcattcaattctttaattcagtgtgtctccaggagaatacattcctggaaaattaatcaagtcttctctttttaaaaattagaaaaatgttgggaatataaattcctgtctcaaaaattacattggtagtcaggacagcacacattgtcatcagatttcctatttctaaggataggatattgagtttttcaagacgcttcctcttgtttccatttgtgttcctgttcagatgatttaataatttacaagtatattctgacatttttcctggagaaatttaagattcaaataagcatcttaggctgaggatttagcacagtcaataaactggttttgtagcaaccacgaggccctgagttctatcccaagacagttggggatgacagtgtgaacctttaatccctggtcctgagaagtggagacagagaaatccttggtactcactggatagccagtctcgcccaattagtgagctctaggccaaaagaagacattattacaaagggcaaggctcttaaagatgacacagaaatagtcctctggcctcccacacatgcacatgcacactcacgtctgcacacttatgtctacacacatgcataaaataagtacttaatatttaaaagttatactatgcttattatgatatggagttattattttgattttcctacgagaactttcattataataatgcacacaattctgttcttaggtctctttaaggtcatggctgataaaactccatacctgtcaattgaagaaatcacaagaaccgttaatattggacccagcagactaggtcatccttgcttttatcacctgaaggatataaaactagagaatctcattattaagcagggtgagccaatccggttcaactcagttgaagagattaatggagaaacgctggtgaattgtggtgtggtaaggaatcatcagagccactcatttactttgccattgtcacaagaaggagaattttatgagtgtgaggatgaacatatctataccctaaaagaaattgttgaatggaagattcccaagaacagaacacggacagtgaaacttacagatttctcgaataagtgggactcaaccaatccattcccagaagacttttatggtacactgattctcaaacctgtttatgaaatccaaggtgtgctgaaatgtaagtatccactgaggatgctatcctgtgtgagtttgcattgtgggatttgggctagagaagcttttagaacatgaagaatggaactctgtccctatcattcattagttctcttagacttaggttctccatcgatacatccaaccacagatagcactgtcttaaagagaaaattatgaagtgagtatgcagatatactataaaccatttgatgttctatccaagcataagctgctaaactatcagatataggtagcctaaaatgcttgctatttttattactagttattaagagtttatttttagaacaagaatcagaaatcagttttctttacagaatcccttattcttacttcatgacaacttttgtttcaaactcttaccaatttatgactggtcacaatttcttttaacacagattccttgacttaacaaaaatgatatgttaaagtaattttcatattggtgtatttcaaaatgcaatcttcattgttattttcttatgttttaaaatatctacaaagaccattattattctaaatatttcaaacttagggaaaccagaagagtattaaattctgaccctggttcaagcccaacatgatagcatgcctcgtaaccctagcttctctcaatgttgaggcaggagtaaggtagttcaggcctgctcaggtgacacagatagttcaaggccagtgtggtcaacttagcaagacacaaaacaaaaaataaaaaggagaagagaatacaactgaggatcaggcagttacttaacacaagtgagcaccaaggttcagtaactttctaaatgaaagctctggataagctgtgcttgccctcttggacgtgttttcaaagtaaattaagacagtactaaataacttaagatcatccaacagaaacaaaatatattgtcaaagctacttcctcaaatatctcaaaattggtttttctctgtcctcattgccattacatacttacaaaaggaaagcatatggcatttggtaagttttagaattgtgtgttgaattctatcatgctaagaagtttaattaaaatttgatcaattcattttgaactaaaggtatgggaagagtttgcatggtttgattttataaaatattgacgctgcagcaaattttagaacttacagtagtgctcagcttgctgcctcaaagcaggcaactgaaatggatgattgagtttttctgattgtttatgaataatagataggattttattattttcaaatcatcttatttttctaaaattatcatcttctacctgtcataggcttacaaatgagaacaaacccagagcctaaacgtgtggagagagacattagaacttttaattaatttgcattaggaatcaaatgttgatggatgaatttgatgtagtcaaaccatgcaaaactagacaaaattaagcaacttgtggcagagtgagtaagaaagtgagtggaaattcattacagctctataaaaaaaaaagaacagagaaaaacatgaagatacacagggcacatatgtgtttgttggggaagggcagtgaccattcacagaaagtcataaagacttcccaaagagataaacttgaaatttgtcctaatcaaaagagactgctaagctggaagatgtagcacatgtgagcatagtgattctagtggagaaatcggctggatgttacagttcttttcgatggacatagcaatgggaaagacagaaaacagagatgtacttagtatgtgcaagatctagaaatctagtggaagtcatcttggtcaaccttaatctcagccgttgattttatctactggttggatgaatatgcattcattaaatataaacagcagaagagtaagttttattagaattgttcctgtagatttaaatagagttttctgccacttaaccaagaaccaacctttggttaaacatccttcatgaaatgtttaagcatagtttctagtatgtattaaaataaaaattccatgttcattattctgggcaatttttctttaggaaattttaaatattacttatctgcatttggtctgatatgagcttgcatgtatacagactgtttcatgaaaacaaagcaggagaacccatcataagtgacacattttaaaaactttgggttacagatattttcctctaagtatgcaaagatgctttaactttgttttggtcttctgcattatttttttgaaggaggttagatgctccttgaatttaagagacattgcacagttgcttttactgtgcctgagtatcaggcagagtctaaacactttaggcttcagtgctttccccaccaaagtgacaggaaaaagaactggtctggaaaagataggatattttacagtaaccttagtggaagatgaaaaattatctaaatagctatgaaatattgatttcctgaaaataaaaacacgacaagtaataaaaagagggaatatgaacattttactcttgtcactggtttttaatatgttattaatgtgacaatgtgtaacccagaaaaaggaaaatcagtagaaataaattacatctctttgcatttgagtcatgacctcattgggtgtcaaacaacccttttacaggagtcacctaaaaccgtcaggaaatacaaatgtttacattacaagtcataacagtagcaaaattccatttatgaagtagcaatgaaaataattttatgtttgggtcaccgcagcatgaggagcagtattaaagggtcacagcattgggaatgtggagagccaccatgtcagagggaaacacatgcttctggattctggtcaaaattcctttataggcttaacaccttcccggctttcaggcacactaagacattgctcaaagagttaccacattttcaggagaggtaactatttaaatcctgtaactactggtctcataaagtagttccaaaatgtgtttttgcttatttaaaaaatattaaaattcatgtgatgaggtacatggaagtttcagtattgacaaatgaaaaattgaaaatagaggtcttgtatatcttatgtcttgatgcatggattaataattcgatccttcttaactgaaaaattccatcatcacataaattcttttatcttttggaggaaagcttaatgctgcccaaagcttggtggttggttcagtcttcatgaagatatataaaaatatgaactcgtgtcataagctcaaaccactaagcaaaaagaagactgagcaaaattgttttgaatatcatatataagattataaataagtaggagaaaatactctcatttgtagtttcctaatgccttggacttgaccatgctgtttccctgaagcattctccttgtttctgtcttaatttaaagaagacatttccaacttttataaaaaccaagaaacctaaataacacccgagaaagatatgacaaggttacatacaaactttatagctttgactgttctccaatttcccctacattctcctactctaaggtaactcttgttaatattttctcccttgcttcctggtatttgccttcctgcttccaaatgataggaacatgagtggattttcaagtcatggaccattttagatagtaacaattgccactatatttgagaaaagaaagaaaacgaaggaaaagaaaataacctatctatgcatttttcccatagtgaagccatcagtggatttctctgagatataatttccctctgtggccattccttctggagttctcatccttgtagtccaaccttaatctgttgctatatagataggggcatccattacaactcaccctggcggtgccttcttctgccttgctcttgtgtgaagtagctatttccacaatcaataaggaatctcttctttctttatttttctctagttctgacaagacccatcctctttatgctttctaagtcaagaatctgcaggtttgaaaactctgtcccctacatccacacatgaaatgggcagtttagccaccatgaaattctaggtggataatgtgatttgttaacatctttgctcctctttggtcgttactgctcctctttggtattacctttgagcgactgtggcattctatggtcttgactgtggttgtggcaggtttgaactttcaaagtgatgacaattttgcatttggtaacttaggtgtttcttttctgaaaagactttttgtgttaatgccttctcagtaatactttgtggtctgcctgtctttaactttcagctgcatatcaaaacctcaacccctaactaacactttccccttttgcctccctgacttaatgtaccttcatgaaaagttccttcacacaattctatcatcatgatgaattttaaagttcagctttcatatttttaccttctaaaaattatgtcatatatagttttaaatgttagtcaccccaatttagctttaatgatgcagtattctaatccagagaaatttctatattttctatagttttaatgcatttatatctttcatttggtttcttgttttgttttgtcgtccttcatgctttgttctatcgttttagttaagtggttttcttgagttcctgctatttgccatgtttccttatttagatgtgagatgctttaaacaaagcttcagttctgtagactctctgtgttgatgagttctaatcttctccatgtagcagcattactgctccacttctattatctttcctctggaatttacatagtttcacgaagattttatcctgctgttttctgtggttatgtagttattgaatccaaatgatgagtagctgaaggaatcaccatgatccctatggctttagataatgtgatggtttctatatgcttggcctagggactggcattattggagtaggtgtagccttgttggagtaggtgtgtcactgtgtgcatgggatttaagaccctcctcctagttgtctggaagccaatcttctctgcagatgaagatgtagaaatctcagctcctcctgcaccatgcctatctgaatgctggcatattcttggcttgatggtaatatactgaacctctgaacctgtaagccagccccagttaaatgtccttataagagatggcttggtcatggtgtctgttcacagaagtacaaccctaactaagacagataatagtgttttcaggcttacacttccttcttgtggtccaggattatgaggtcctgtttcctatttagaaaggttgtagtagggttacccatcatccctaaagacctgagtttaatattcagacatttgaataaattcttttattttaaaatttttattagatattttcttcatttacatttcaaatgctatcccaaaagtcccctatacctccccccaccctactcccctacccacccacatccatttcttggccctggcattcctctttactggggcatataaagtttgcaagaccaaggggcctctctttccaatgaagaccgggtaggccatcttctgatacatatgcagctagagacatgagctctgagggtactggttagttcatgtagttgttccacctatagggttgaagaccccttcagctccttgggtactttttctaactcctccattgggggccctgtgttccatcctatagatgactgtgagcatccacttctgtatttgccaggcactggcatagcctcacacaagacagctctatcagggtgctttcagcaaaatgttgctgccatatgcaatagtgtctgcatttcatggctgattatgggatggatccctaggtggggtagtctctggatggtccatccttttgtctaagctccaaactctgtctctgtaactcattccatgagtattttgttccctattctaaggaggaatgaagtatccacacgttggtcttccttcttcttgattttcttgtgttttgcaaattgtatcttgggtattctaagtttctgggctaatagaggaacactcctccattgctggtgggattgcaagcttgtacaaccactctggaaatcagcctggtggttcctcagaaaattggacatagtactaccagaagatcctcaatacctctcctgggcatatacccagaagatgttccaactggtaataaggacacatgctccactatgttcatagcagccttatttataatagccagaagctggaaagaacccagatgtccctcaacagaggaatggatacaaaatatgtggtacatttacacaatggcatactactcagctattaaaaataatgaatttatgaaattcttgggcaaatggatgtatctgaaggatatcatcctgagtgaggtaacccagtcacaaaagaacttacttgatatgcactcactggtaagtgaataaattctttttaaaacccctccatttattttcacatttaaatggcttagatgtctccaattcttaaacattttgggaattctgtgggacttacttttatccatgtttctttgctcaggcacatgctcattccttgtcctggtcaacccaaacagttcactttcttacagctgatctctgtctccttcacaatttactttgctgatgtcagatttgctgactctaactctgttttgttttgtttgtgttggttttctctctttctgtgttactattttatccttgtagtaagtttgaagtataagaggattacaaagacatattttatgcataatcctttcttgctcacttaacttagtccttggccagaattttggctagacctactgtaaattctgaaaatactacatgatattattgtaaatattactaaacacttgtgcatacttgaaataaagttgaaaaaaatttacaaaataattagcaagaaaattcaagcaaaagtgatagaactagaaggcaaactttaattgaagagtctggaacaatgtagaactgccaatgagtaagtaatcattgccattcctattaaataccaacatagtataaatataattggggagaaatcagagctttaaattataacaacttggttcatgtagaaactctatatccgctctgaggcggcgccattttcggctacagacaacctgccaccttcctggtgagagcacaggggtccacacggcccgagaggcttctgcctcatgttccgcgggggccaccttgattctgggactccgcagcgggcagtctgcaggccaaagcaacacggcttctgggaaaaatcctgttttgggccttcatcttcggccaggaggaggtccaaacaccagataactgtgcacctccctgaaagaggagagcttgcctgcagagactgctctgaccactgaaactcacggaagagagctagtctccctggtctgctgatatagtgtaacaaaatcaccagaggaacaatctctaaacagagacaactataacaactaactccagagattaccagatggcgaaaggtaaacgtaagaatcttactaacagaaaccaggactactcaccatcatcagaacccagcactcccacttcgcccagtccagggcaccccaacacacctgaaaagctagacctggatttaaaagcatatctcatgatgatggtagaggacatcaagaaggacttaaataactcacttaaagaaatacaggagaacactgctaaacaagtagaagacattaaagaggaaacacaaaaatcccttaaagaattacaggaaaacataaccaaacaggtagaagacattaaagaggaaacacaaaaatcccttaaagaattgcaggaaaacacgaccaaacaggtgatggaattgaataaaaccatacaagacctaaaaagggaagtagacacaataaagaaaacccaaagtgaggcaacagtggagatagaaacactaggaaagaaatctggaaccatagatgcgagcatcagcaacagaatacaagaaatggaagagagaatctcaggtgcagaagattccatagagaacatcggcacaacaatcaaagaaaatggaaaatgcaaaaagatcctaactcaaaacatccaggaaatccaggacacaatgagaagaccgaacctacggataataggagtggatgagaatgaagattttcaactcaaaggaccagcaaacatcttcaacaagattattgaagaaaacttcccaaatctaaagaaagagatacccatgaacatacaagaagcctacagaactccaaatagactggaccagaaaagaaattcctcccgacacataataatcagaacaacaaatgcactaaataaagatagaatactaaaagcagtaagggaaaaaggtcaagtaacatataaaggcaggcctatcagaattacaccagatttttcaccagagactatgaaagccagaagagcctggacagatgttatacagacactaagagaacgcaaattccagcccaggctactatacccagccaaactctcaattaccatagatggagaaaccaaagtattccatgacaaaactaaattcacccattatctctccacgaatccagcccttcaaaggataataacagaaaaaaaccaatacaaggacgggaaccacgccctagaaaaaacaagaagataatccctcaacaaaactaaaagaagacagccacaagaacagaatgccaactttaacaacaaaaacaacaggaagcaacaattacttttccttaatatctcttaatatcaatggtctcaactctccaataaaaagacatagactaacagactggctacacaaacaagacccaacattctgctgcttacaggaaacccatctcagggaaaaacacagacactacctcagagtgaaaggctggaaaacaattttccaagcaaatggtctgaagaaacaagctggagtagccatttaatatctgataaaatcgacttccaacccaaagttattaaaaaaggacaaggagggacacttcatactcatcaaaggtaaaatcctccaagaggaactctcaattctgaatatctacgctccaaatgcaagggcagccacattcattaaagacactttagtaaagctcaaagcacagattacacctcacacaataatagtgggagacttcaacacaccactttcatcaatggacagatcgtggaaacagaaactaaacagggacacagtgaaactaacagaagttatgaaacaaatggacctgacagatatctacagaacattttatcctaaaacaaaaggatataccttcttctcagcacctcacgggaccttctccaaaattgaccatataattggtcacaaaacaggcctcaacagatacaaaaatattgaaattgtcccatgtatcctatcagaccaccatggcctaagactgatcttcaataacaacataaataatggaaagccaacattcacatggaaactgaacaacacacttctcaatgataccttggtcaagcaaggaataaagaaagaaattaaagactttttagagtttaatgaaaatgaagccacaacgtacccaaacctatgggacacagtgaaagcatttctaagagggaaactcatagctctgagtgcctccaagaagaaactggagagagcacatactagcagcttgacaacacatctaaaagctctagaaaaaaaggaagcaaattcacccaagaggagtagacggcaggaaataatcaaactcaggggtgaaatcaaccaagtggaaacaagaagaactattcaaagaattaaccaaacgaggagttggttctttgaaaaaatcaacaagatagataaacccttagctagactcactaaagggcacagggacaaaatcctaattaacaaaatcagaaatgaaaagggagacataacaacagatcctgaagaaatccaaaacaccatcagatccttctacaaaaggctatactcaacaaaactggaaaacctggatgaaatggacaaatttcctggacagataccaggtaccaaagttgaatcaggatcaagttgnnnnnnnnnnnnnnnnnnnnnnnnnnnnnnnnnnnnnnnnnnnnnnnnnnnnnnnnnnnnnnnnnnnnnnnnnnnnnnnnnnnnnnnnnnnnnnnnnnnnnnnnnnnnnnnnnnnnnnnnnnnnnnnnnnnnnnnnnnnnnnnnnnnnnnnnnnnnnnnnnnnnnnnnnnnnnnnnnnnnnnnnnnnnnnnnnnnnnnnnnnnnnnnnnnnnnnnnnnnnnnnnnnnnnnnnnnnnnnnnnnnnnnnnnnnnnnnnnnnnnnnnnnnnnnnnnnnnnnnnnnnnnnnnnnnnnnnnnnnnnnnnnnnnnnnnnnnnnnnnnnnnnnnnnnnnnnnnnnnnnnnnnnnnnnnnnnnnnnnnnnnnnnnnnnnnnnnnnnnnnnnnnnnnnnnnnnnnnnnnnnnnnnnnnnnnnnnnnnnnnnnnnnnnnnnnnnnnnnnnnnnnnnnnnnnnnnnnnnnnnnnnnnnnnnnnnnnnnnnnnnnnnnnnnnnnnnnnnnnnnnnnnnnnnnnnnnnnnnnnnnnnnnnnnnnnnnnnnnnnnnnnnnnnnnnnnnnnnnnnnnnnnnnnnnnnnnnnnnnnnnnnnnnnnnnnnnnnnnnnnnnnnnnnnnnnnnnnnnnnnnnnnnnnnnnnnnnnnnnnnnnnnnnnnnnnnnnnnnnnnnnnnnnnnnnnnnnnnnnnnnnnnnnnnnnnnnnnnnnnnnnnnnnnnnnnnnnnnnnnnnnnnnnnnnnnnnnnnnnnnnnnnnnnnnnnnnnnnnnnnnnnnnnnnnnnnnnnnnnnnnnnnnnnnnnnnnnnnnnnnnnnnnnnnnnnnnnnnnnnnnnnnnnnnnnnnnnnnnnnnnnnnnnnnnnnnnnnnnnnnnnnnnnnnnnnnnnnnnnnnnnnnnnnnnnnnnnnnnnnnnnnnnnnnnnnnnnnnnnnnnnnnnnnnnnnnnnnnnnnnnnnnnnnnnnnnnnnnnnnnnnnnnnnnnnnnnnnnnnnnnnnnnnnnnnnnnnnnnnnnnnnnnnnnnnnnnnnnnnnnnnnnnnnnnnnnnnnnnnnnnnnnnnnnnnnnnnnnnnnnnnnnnnnnnnnnnnnnnnnnnnnnnnnnnnnnnnnnnnnnnnnnnnnnnnnnnnnnnnnnnnnnnnnnnnnnnnnnnnnnnnnnnnnnnnnnnnnnnnnnnnnnnnnnnnnnnnnnnnnnnnnnnnnnnnnnnnnnnnnnnnnnnnnnnnnnnnnnnnnnnnnnnnnnnnnnnnnnnnnnnnnnnnnnnnnnnnnnnnnnnnnnnnnnnnnnnnnnnnnnnnnnnnnnnnnnnnnnnnnnnnnnnnnnnnnnnnnnnnnnnnnnnnnnnnnnnnnnnnnnnnnnnnnnnnnnnnnnnnnnnnnnnnnnnnnnnnnnnnnnnnnnnnnnnnnnnnnnnnnnnnnnnnnnnnnnnnnnnnnnnnnnnnnnnnnnnnnnnnnnnnnnnnnnnnnnnnnnnnnnnnnnnnnnnnnnnnnnnnnnnnnnnnnnnnnnnnnnnnnnnnnnnnnnnnnnnnnnnnnnnnnnnnnnnnnnnnnnnnnnnnnnnnnnnnnnnnnnnnnnnnnnnnnnnnnnnnnnnnnnnnnnnnnnnnnnnnnnnnnnnnnnnnnnnnnnnnnnnnnnnnnnnnnnnnnnnnnnnnnnnnnnnnnnnnnnnnnnnnnnnnnnnnnnnnnnnnnnnnnnnnnnnnnnnnnnnnnnnnnnnnnnnnnnnnnnnnnnnnnnnnnnnnnnnnnnnnnnnnnnnnnnnnnnnnnnnnnnnnnnnnnnnnnnnnnnnnnnnnnnnnnnnnnnnnnnnnnnnnnnnnnnnnnnnnnnnnnnnnnnnnnnnnnnnnnnnnnnnnnnnnnnnnnnnnnnnnnnnnnnnnnnnnnnnnnnnnnnnnnnnnnnnnnnnnnnnnnnnnnnnnnnnnnnnnnnnnnnnnnnnnnnnnnnnnnnnnnnnnnnnnnnnnnnnnnnnaccgaatggcagagaagcacctgaaaaaaatgttcaacatccttaatcatcagggaaatgcaaatcaaaacaaccctgagattccacctcacaccagtcagaatggctaagatcaaaaattcaggtgacagcagatgctggcgtggatgtggagaaagaggaacactcctccattgttggtgggattgcaggcttgtacaaccactctggaaatcagtctggtggttcctcaggaaattggacatagtactaccggaggatcccgcaatacctctcctgggcatatatccagaagatgccccaactggtaagaaggacacatgctccactatgttcatagcagccttatttataatagccagaagctggaaagaacccagatgcccatcaacagaggaatggatacagaaaatgtggtacatctacacaatggagtactactcagctattaaaaagaatgaatttatgaaattcctagccaaatggatggacctggagggcatcatcctgagtgaggtaacacattcacaaaggaactcacacaatatgtactcactgataagtggatattagcccaaaacctaggatactcaagatataagatacaatttcctaaacacatgaaactcaagaaaaatgaagactgaagtgtggacactatgcccctccttagaagtgggaacaaaacacccttggaaggagttacagagacaaagtttggagctgagatgaaaggaaggtccatgtagagacttccatatccagggatccaccccataatcagcatccaaacgctgacaccattgcatacactagcaagattttattgaaaggacccagatgtagctgtctcttgtgagagtatgccggggcctagcaaacacagaagtggatgcccacagtcagctaatggatggatcacagggctcccaatggaggagctagagaaagtagccaaggagctaaagggatctgcaaccctataggtggaacaacattatgaactaaccagtaccccggagttcttgactctagctgcatatgtatcaaaagatggcctagtcggccatcactggatagagaggcccattggacacgcaaactgtatatgccccagtacaggggaacaccagggccaaaaagggggagtgggtgggtaggggattgggggtgggtgggtatgggggacttttggtatagcattggaaatgtaaatgagctaaatacctaataaaaaatggaaaagaaaaaaaaaaaagaaactctatatcccctccatgatctcaaaaagaacatctaagtaaaattttattgtattctacaagtgaaaattatgtatccaaggaaacaggtattatgcaatacccaccaagattatatatatatatatataatgttttctcttaaaagatattttttttagtggggaccacaaaacttagactgaaagaaaagtgtctctctggtaagccatataagaagatacaaccctctcaataacatttattctacacagcagggactttcagaaagaacaggaggagatgggggggggggagaaagtagaggaaaggagggggagggagagaaagaaaagagggagagggagaagtaaaagtgaaagaactcgggagtacaagtcttgatttgttagagaaaatggaatcaaattgtttttcataacaatcccctttggataacctgataacatacccagctagaataattcatatttacccagaaggaaaatttggaaagtctaaactacagttgtcaagtacatattgcttctgcctcagtctagtttcaaactagaaaatttgcaacaaatacctccaggagagcctctcatgctgagttactgcagtcttacctgtctgtcatgttgaagtcaaagacaacacttcagcaagtgacattttctaactcagctaactctctagattgtttttatcacaggagaagattcactttcccaattgtagaataataaatactccttaaaagagctcatattgcatatgcacaatgcacatgtgcacaaacacaggcatgcatgtgcacatgcacacatgcacacagacattcacattcatgcacatacatgcacccacatgcacacatacatatactcttaaacaactataactatactttacaaaatattattgggtatactcaaaatgatttttaaattttttgaaacgtgaaattttttccccttatactatggaaatcttaaataaaagcagttgatactgttttctgagaaaactgaaagtgcagtagagatctggggacaatcttttgatataacaatactcaccataggaatagttatatctatgccacttttaaaacttaggagatcaagttttatttatttgcttaccttagagagcctcccactaagaacagaacgttttaattctgagcaagaaacatcttgacatcttttcaagttatttgaacatggtattcataggtagagatttttgggatgtgttctccttagtgttgcccatttcatgcattttggaaggcatgctgctgttacttctaatgttccttctgttctccctcttttcttctgagtgttttcatgaaaagtgtgttgcatcttctgtaacacagttcttggctactctgttccattcctttcaacccctttgttttatttgcttatcttccaacttctcagttcttttccttggcagtatctagtctattttgtaatccatcaagtcattctttgttcctgttccagttactttccccctagaatttctatctttctcttacattgcccatccttttctcttcagtctatttgcatattgattagtcactaaatagttggtatgatgtttccaaaaactcttccatatttaatttggtttgtttctagcttgctatttggtttgctgataatcagagtcttgtgtaacccatgcaggcttgagaataaccatgaattcctgcttccatgtctcaagtattgggattacaagtatgcattcaacttgaatttggttttgacacaagcatttttccattagatttgtcttttgtcttttatgacacatcgtatagttattcacataggaatccagaaaaggtggttgcagtgaaagaaacaaagtcaaatagttaacagtatgaggtttctatgattccatggctagggagaaggtggtttgcttgttttgttttttgttacttttcctgctatagctgtgtccaaggctagaattttctgtagtgctttcattctttaggggttcctttgtagaatcttagatgtcagtcttttattcagaactctgttaacatatacgagtaggcaaaacttttgtgggtggtgtattgcattatcttataattcgggcttagtcattcagtgagtctgtgtatctgtgatatggcttttgtgtttctcagcctcttccccctctcctacagaggtgacaaactgcctatcctgagctggacttgggtatttcccatcccctgtgcggaaatagaagagttaattgggtatttctcccccccccccatgtagaacctaaagtagcatttgtttgagttggataattcctgtcttcccattgtttaggctttggtaaaaccccacatgtttgttaggctcttatcaaataatcgtccctacatttgttctttaaagcgatcagaggctctggcagctgctcttttcttcactttgcaaaatgcacaatggggtttttctctagtcttcatgtagataatctgctgtggtttctggaaagaaggcccaggaaagagtaggaggctctgcaaagtacagtctcacaggttagtttcctgttcacttatagattccaggaactaatcaatacccctaaaggttcttacccgtgtccaggcaccaatcgaggttcttcttgcagtgaactaaagctctgcatcaccttcattctggttggagctaaaacacatcaccatgctaccttcctgtgtgtttagacatatacaaaaatggttttgttcagtgttttttcttttccactgaagaataaaaacttgagcttaaaagagttcactttggcaatattagactcttatatccctattatgttatataaatgtgacaaatactcattctatagagcaggccattgaatgagagaaattttaacttgaagagatgtgtctcaaatgaagtctgcatatttagacagtataagtatttttacctaattaaattttaaatggtggtattacttaatgacaacttttagtgttgactcaaagggcattgggatgacagctgcttttctctcatttgattgatggagacatcattctagactggaatatattgatgagcaattgatgggcaaagcatcaaagatttcttatcttggtaaaaatgtttgaatttaaggaaaaatatagaaattttgcattatgaatgtgttgatatgttccaatttgagcaaataaataatagaaaatggtcataaagaacatatatgttctgtgaaattactgaaaacaaaggaaggcacagaaagtgcataaactaacaaggacacagggcattgagggttaagtttttaagcagaatatttagaatggattgtattgaggaggcaatatctgagcgtacttcaagagcaagaagggtaggccatgaaaatatgaaaataactagttacaggaccagaaaacaaaagaaatagggcatacaaaaaaaaaaaggattgacaacagaactgagagagagagagagagagagagagcatgcaatgggttagagcaagttgagttatcagaccagatcaaagtagtaccaaggagaaccaggtaaggacttgaatgtatttgatattgtagttctatgaagagatggtaggtataattgatgtagcactcagaaagagtctttggctactcttttgatgtttgaggttctggagactcactaggaagacttgcaacaaacctagtaagaaacaatgtggcatagacaagcattttattgactgggatgcagaacctcaagtagcagaaaaaagaggaaatctgaagatgtctctggtgttggtggaatgaagaaagataaaggagatggagaaagcatcagatactattctctttgtggggtagggcagactgcatcaagaatgttaatcttgagttacctgctatgtgtgtaaaaatagaggtattaaatagatatatagaatccaggcgcatcattttgctagagctgtaacagatagatgctatttaaaggcatgaatatgcgatgtgaaggttatacatagagaactgtaagtgaaggatagagaatggcagccaagacacttgaaaagacatgtgcgtgtaagcagcaggtggcatggaaagaaaagaaacaggaaaaaaaggaacacaaaatagagaaaaatagttcaaagtggaaggaatcaaatgtactttgtcaaatgctgttcgtatgttatgtaaaaaggagacagactattattacttcagaagagttaaaaatcaaagtgccaactctcagcaagtttttattatactcacagattagggtgtcttccagccctcattggagaagcttcttttggcaggagatagagactaacacagagaccattgactggtcagggtgtaaaggatagagtgctcagctctaagtgtgtcatttgtgtcataccccttccttctgggaagggatcatgctgaagagggtgcagaaagattggaagacctggaagtagtagatggctacactattgtgttctgtaaacatttggcagctataatatgaagtcatagaaattttgacaccatgtatatgacccgtgcaaactcaagccagcccaaatcacgacacagaggggaatgagggtcagggagtcccactcctggatgagaagctattagtagttgatagctgccaagaaagagaaattcagttttctttaagagttttggcttctcatagctgtaatataatctattgggtggccatatatatctaagaattactaacaggacttgaaggattttaagcaaatggggcatgtgtgaacatgatcaaaatatgaacattttgaatgaataaaaatatttaaaagaaataaaaatactgaaggtaagtcaggaaatttgaatacaggggttaggcatcttggcccaagttttcttcagaggccatgaaattctccaaaaataataaagttattttttgccaactgcacacactatcgagcaatgaaggtagagatatagctacattatggctctgctattctgatgggattatttagagatatttccaaaccccaaatgacatctagtgtaccaactcaaattgttcctgtatttaaagaatgtatgaaactaggatggccatctagatcttgtactagaactctaaaactgacttcttttattcagttaacaagattttagtttctaaaattgcctggggtttaagaagcctcatgacacatattcttaattaaaggaagaagctttatacaatgaactgaaaaataagagaatttggggagtattttttcttgaagctcctctttttattatttcttattttaaatgaacctacagatttatagaactccattgtagaagccacgatttattttattttattttcattttattcaaaataaaagaattttttcattttatgtcattagaaactctgtcatagggaatatatgtgatatgatacaaattatatatggtatattgtcagatgctgaataaatgaatattaatatttaaaaataataacataatattttagaagaaaatattttctaaacttttgtgtttttaattacatgggagagtgtcaagtgtggtgccacatgcctataacctcagtaagtaggaggaagtggcacaagggttgccatatggtgaggctattctgggatacacagtaaactccacgtcatcagccatggctacagagttaggcccttctcaaataatcaccaataagaaatcccatagctccacccaactgctgctgaccccaaaacaacagccaagcaactaactagtcaaccaaacaagaacatttacctccagtgactagagataatgggaaacaatatggatttatgaaaaatggttacaaaacttgtgttagaaagacatacaaaaatatatgctattataaatcatcttaattaaagaagatttgtaataatattttgagattactactcagagagaaagtgtatgagcacaatgttttaagtggctctgaagtctcaaggcttcctagagcacagatttgcttgcccccagtgacatagttgtgtggtgtgcactaaccattttacaatgtgtaccttttcactgtgagctatcctgtaacactatttctacttgggcaagatatagcactggtggaaaaaagtaaactttgacatttaaaaattgtctgtctctatgccatacttaaaatatcttacattttgtgtgtgtgtgtgtgtgtgtgtgtgtgtgtgtgtgtgtggaggtgggggggggtttggcacgttgttttgtcctctagtataagatttgcatgaaggttatgttagatactttaaacatgagtttctttatgaattgcaaagcttgcttaaataataattttacatataattcctggatctcagaaatgtgacttaaaatcaaatgataagactttcacacttatctatttatatgtacacttatatggatgcatgatgtatgtcataaaatatatgcatatatttaagaatgagcagcatttaagtcaggagagtgcttaccatttgtagtagtaagaaagaagtgatatttgctgagttttacataaatataagggttgggtaacctctgtttcttgagttgagcatgttggtatatatatcattttgttttcatcaaaaagtttcaaaactgaaaagtctaacataaggaaaattatattatgattatttgaattcttttctccctcctaaatgaaaattatctatggtattggaagattatctctacccagacaccatctcttgagagctctttaaacaaaatgtcagttgtcttctctttcattttcagttcaaaaggacatagtccggattctcccaagtttagacgttgaagtcaaagatattactgattcttatgatgctaactggtttcttcagttgctgtctacggacgacctttttgaaatgaccagcaaagagtttcctgtagtagctgaagttgtcgaaatatctcaagggaaccacctgccccaaagtattttgcagcgagagaaaaccattgtcatccacaaaaagtaccaggcttcgaggatcttagcttcagaaattcgcagcaatttccctaaaagacacttcttgatccctattagctacaaaggcaagttcaaaagaagaccacgggagttccccacggcctatgacctgcagatagctaagagcaggaaagaaactctccacgtggtggccaccaaagctttccatacacttcacaaggagctgtcccctgtgtctgttggagaccagtttctagtgcatcattcagagaccacagaagttgtctttgaggggacaagaaaagtaaacgttctgacctgtgaaaaagtcctcaataagacccgtgaagatgcacagcttcctctatacatggaaggaggttttgtagaggtgattcatgataagaaacagtatcagatttccgagctctgtacccagttttgctggcccttcaatgtgaaggtggctgtgagagatctctccattaaagatgacattttggcagctaccccaggacttcagttagaggaggacatcacagattcttatctacttatcagtgactttgcaaatcctgaggaatgttgggaaattcccatgagccgcttgaatatgactgttcgactagttaatggtagcagtttgcctgcagatgcagggctacttcaagtcaggagttttgtagaagagattacagaagaacagtattacatgatgaggaggtacgaaagttctctatcacatcccccacctcgccctcccaaacatccctcagctgaggaaatgaagctcaccttgctcagcttagcagaagagagaacaataaatctgcccaagtctctcaaggtaagacaacaattttacagattttcttcttcttgagatattaagttttgggttgtttctgaatgtgctttttttccttctgttcttcatacaagtttgaaccaaatctgtctaatacatgctgcatgaacaaatatcaacagagcagaagctgccctgttgcagcatttggtgctccaccagaatatatggcatgaaatctatgtagagttggaaatagaagggataccattttgatatgaccacagaaattgacattcaaaggggttttggtgattaaatatatttaataagatgcctctaaagaaaatcccttttattctggaaatatggctcatttttcttaggtagaattatcttaatacttcacccaggaaatgagcataacaataaactcccagcttcataggatggggggagcttactgctaacatgcatccctaacacatgtcttcattttgtttcatgtgcaagatgatgtaaatatatctggccagaactgtgtgagagaatgagagcatctacatacataatgctgcttagaattgtaatctttagcagttctattggaaagataaagtcaataagcatataggcactaggaggttttaacagatccaaactgctcaggacattggacagtaattcagcatcatttgtacttgatgttgttgattcttgagcatgtctgaaggatacctgagccaaacttgctccctcatccagtatgcacatttggggtgtgtgtgtgtgtgtgtgtgtgtgtgtgtgtgtgtgtgtgtgtgtgtgtgtgtgtgtatttctatgttgtgtggaaggagtgtgttcttttccagcagatgttatgctagaagcataaagaaaaccaagcagttagtaaaagagatactttctgattgctcctcacattcaggaaagatggcagtgctgggcaccaagactcatatatggatgtgggtctgcttgcaattgtacgtatcagagactgttttaattttgtgctaaaagttaaatccttaagggtttctaaaattgttttctgttaaaagaataaagctaccatatttatctctgaaaaaataatttctaaaaattactaaaaaaacagttccaaaataaaattgagcaggcaacatgaaggaattctttgatacttgcaattgacatattgttttcactgagttgcataatactaacactggtgattaggacatagacttagcgttcccaggttcttggcatcttattttaagaatgaagcaaagcaaagcaaagcaaagcaaagcaaagcaaaacaaaacaaaacaaaacaaaacctcacatatatttgcagaagtagcaaggaaacgttattctaagcaaagcatagagcagatctaaaccacactattaggagtgatagtgggccacatgagagaaaatattcaagggccccattattgtttaggttttcatttatgggatccaaaagtttctgacttgctatatgtgggaagacagacactcaattgatggaacgactccaccttactggtctaggcatttctgtcagccatgtctgtgattactacatggtttgggtgactgtccattctgattgacaagcttacataggctttggtcattgtgaatgtccctgtccagcatgcatctgattttaattatatataagcataagaagatgaatagggtattgctaacagattattaggtgcattgttcagaggtgtgtgtgtgtgtgtgtgtgtgtgtgtgtataggatatgtgagttaaaggtctcaggctgccaaacacctaatgtgtgtgaatgctggtttagaatccaaatgactcaaccattccctattcttgcctacttcaaagtgagaaatggatgttttcctacattttattaaagggtagaataatatcacccacccaaagatatataacttcccagaacctacagggataaaacatggcacgacaaaagaacatttcacctatgtttaaaatccaggaccttgaaatgagattatcctgaggtatccagataggtataatataatccctgaaggctttataaaacttttccatggaggccagcattacatggagaaatgattaaagagtgctaaagagactatgctcctgttttcaaacagagaggaggggaaaaagtggttgacggtactcctccaaagctatgaagcacagacaaacatagtcttccataggaggtccagaaagaatcaacctagctgataatacatcagtttgactctatcagttctcagttggatttctgacttgctgacctctaagattataatattatggtatttaaaagtctaagttgatagtataacattatatcaagaataaaaagataaatgtggccaggcaatggtggtgcactcctttaattccagctttgggaggcatcggcaggcagatttctgagttcgaggccagcctggtcttcagagtgagttccaggacaaccagggctacacagagaaaccctgtctcaaaaaacataaaaacaacaaacaaacaaacaaaaaataaatgtgacctgttagaacaattttaaaagtagaagtttcttgtttatcctgaatagcttccaaataaatgagacacagactataagatgtatttgataagatttatttgataagcttaatggcacgatatcttagtagttattgatctagtctaatcctcaaagttaatcagtctatttcccagcccaaatccctaagatactttcatattagtattcatctggctctctctgctccaggtctattcccatggtgtctcctctacactctcctcattgtgaatctcctcctcctcctctctctcccttccctggctgccagaagtccagcccttttctctattttactcagtattggctaatcagctttcacttacaaataagagaatacatttgaagcaatgtttacacaaacttgaagtgggatttttttataataagcattacaacacaaccacatttgggggcagagaaatcagcatttgaataacacaaggatcatctttgcatgtaggtgtaaaactatcatgcctataatgacccaaacttgagtagggatttatagaatgattaaatatctaagtctctgtatgtaggctaggatatactttttggaaagttacttgtttgtttgttacacagttatgctgtatgacccagactagcctcaagctcgtgttctttttgccttagcctccagaatagataatggatttgtatctttggataccaatgatacaaataacccacctttaacaacaatgatcaacctttccttttcctcctctctccttcctttcccccttactatgtctgtccatgcccctttccttctttccttccctcctttccttctttcttcctttcgccttcttaccctgtcattgttaggctaggttgttatgttgacctatctggaaagacagactcttagctgacagaatgacttcatctaagtggcttgtggatatgtttgtgggacatttccttaactgatatttgacacaggaaggccagcctactgtgcacagtactatgattttaggaaggtgctatgtaagaaaggtagctcaacagttgagggggatgaagtatgtgaacagcattccatctctcctttagatgaatcaaggaatcatgagccttgggctcatgccttgatttctcttgatgatggtggtctctaagctcaagccaattaataccccccccagttccagagtaacagagcaacaagctataaaaccttctctccttattttccctttcctttctaccctttaaagtgagttttatcagctcatgtgaccatggagaatctgaggaaacagttaagggaactgggatcttgacgataactatagtgggcattcatttttttctatattgggtttcctatctccagctagtttttttaaaacatgtcacaggacttcagagaattcttacatcataaatttcaatttcagtactagaaaagtatggtctatcattatttagactgaattcagaaagaaaaaatatgtaggttacactacatacctctgtcctgactttgtttgctggttgcttcaaccatagacaaagttgatgaatgaatgatttactcttaaacccatacactacataacttagaatgaacaaaaaaaatatcttcttagaattctattggctgggaaatgtaagctcaagttgctagtaggtttaatctccagttccaagatggagtcttgtgactgcatactccagaaaggaggaacaccacttcttcctattctagaaattcagaagagaggaaattcattcctcaagtctcttaaatagaaagttattaagtatatttttgcatggtcagatctatggcctaagccatttcaatccatcccatctccaaatactgttgcattggtgtgaaattgagaacataagcttcaaaagagacaaaaacattcaatcagtaatagttaagaatatcatgtctggacactgtaaaaactaaaggcaaaaaaaaaaataggtgatgtaaaataacagatgtttactactacccaaaaataaaagatgtaaaaattctaacccccccccaaaagaaataatagataaaagtagatttaaaagtttaaaagctcagaatacctaagatacaattgacagatcatgtgaagctcaagaagaagaaagaccaaagtgtgggtgcttcagtcctttttagaagggagaacaaaatactcatgggaggaaatacagagacaaagtatggagcagagactgaaggaaaggccatccagagacttgtccacctgggactccatcccatatacacacaccaaacccagacactattgtagatgccaagaagtgcttgctgacaggagactggaaggctctttcatagcctggcaaatataaaggtgcatccaaccattggactgagcatagggtctccaatggaggagttagagaaggagctgaaggggtttgtaacccataggaagaacaagaatatcaaccaaccataccctccattgctcccaggaattaaactaccaacccaagagtacacatggaggaacccttggctccagtcacatatgtagcagaggatgaccttgttggacatcaatgggaagagaggcccttggtcctgggaagggtccatgtcccagtgtaggggaatgccagggagtgggttggtgggtaggggagcactctcatagaagcagagggagggagtatgggatggggggtttctggaggggaaaccaggaaaggagataagatttgaaatatatataaataaaatatccaataaaaagtaaaaaacaaattaaaatgtatttttatagtcaaaaaaatttgaaaatactttctaaaggtagaatatgacttatgtgttttattaggagaaatatacataacaattttttatcttatgtactaaaaggactaaattaatatatgctgatttccagatctacgtagtaacttttttctgaccaggttccttgtgggtttgtggtactgagatctgagtctgannnnnnnnnnnnnnnnnnnnagggatcttccttgcgccggtgatggtaattttcgtcccaggttttctcttcccgggtttcggcaccaactcttatacgcgttctcacgaccggccaggaaagacacaacaaaccagaatcttctgcggcaaaactttattgcttacatcttcaggagcaggagcgcaaaaccccaagccccaaaaacgaaagcccccttctaaacgaaagcgaaaccccccgtccctatttaggagagttatccttcgcttaggacgcatcactccctgattggctgcagcccatggccgagctgacgtcacgggaaaggcagagtacaagtagtggtaaaatacccttggcacatgcgcagattatttgtttaccacttagaacacaggatgtcagcgccatcttgtgacggcgaatgtgggggcggctcccaacagtcacatatgtagcagaggatgaccttgttggacatcaatgggaagagaggcccttggtcctgggaagggtccatgtcccagtgtaggggaatgccagggagtgggttggtgggtaggggagcactctcatagaagcagagggagggagtatgggatggggggtttctggaggggaaaccaggaaaggagataagatttgaaatatatataaataaaatatccaataaaaagtaaaaaacaaattaaaatgtatttttatagtcaaaaaaatttgaaaatactttctaaaggtagaatatgacttatgtgttttattaggagaaatatacataacaattttttatcttatgtactaaaaggactaaattaatatatgctgatttccagatctacgtagtaacttttttctgaccaggttccttgtgggtttgtggtactgagatctgagtctgattctgaacaatgatgtcctggagtttgtgaagagttgtcaagatgttatgaaattctagaactatttttatttgaggaagctgtattgagtgacagcttaaatttgaaaaccttgacagtaggtgattttagttataggatatatttaaagaactcttcaaagtttggagggatgatatgcatctgtcatcatagcacctgggaggtagagacgtaagggtttgaagatctaggccatcctaagctgtacagggaaactctcaaaatcaaaacaagcaaagcaaagcaagagccatgttactgttgtgtggtgaggagaacagacccaatttttctaatatctccaactctggttgtagtagaagtatggggatatttgatggaatggtgttgtaacacactacaaatgacatgatagaagagaaaacagatggtgggtcgtgtcactagattcctgctttgataagtcaacagatcattgggaagaattcacaattgcttgctattgttccatcaattcttacatgtctaaaagaaaagccctgttcttttctctaaaattgccttaaaatatcactgacaccgccatttttctgtgctcagatctatgagccttctagtttttaatattccttacccatcatggagatgagaatttgcttagtaggtcatttatggaacacaacagaagatctgtcaatttctacataatgtacccagaaaaccagtattttcttattattcctaatatcacccttctgtatatttcctatgataactgaattcaagcttttcttgttctttttgaaataattagacgtaagggttttgttttgttttttaatgttttacattagggagcatcaatttaaaacaagcctctaagtcttgggattttacatggactattgcttaaaatttggagaacaatttgtgagggttacttagaattcaatattcagactcatttaactcattaaaatgcctgtttattttcatagaaaagagtactaaatgctccattatatgggttcactttcactttcctaatgggccattaactttactagatcatttcttgcattgttaaataatagggcagatgtatggacagcttaagagtaatactctaaaatgtactaagtattgcccaaatctatctgtggcaggtgccaccggtcagttaagaacactatgaattcatctaagatgtttgaaaattagtaatctatggggacaggtcacaagaactagatgcagttgagttcttttccatggcaggattaccaactgttttcttgggttgacagtatctcagcaataacaagagtcatgactggaaacctgaagacgacgaagcataaaatggggcacgagatccaaagacaggagaaatgcaccgaggcttaccacttcctcaatataacattaatagatggaagataatatacagaatctaaacataggtgggaagttgtagggattgttgatgacataatgtgaaaataaaatctttacattccatgcaactggagtttttgttagacagaaacaatgttataaagtggccgaataaacaaatccatgcctctaatgtgtcctgaagaggaatgatgtagggtagattcctgctcagaagttacgctttctgtgtcagaactcatttcagatagcttggaagaacatagactccatggagtttcaacggtcatggatatttatgactatagcttttgagtaccacacaggagaaatgtaacttctatatcctgaggaaagggcctataaccagagagaaaaataaacctttggttgaaagatgagatatttcacatcttcagagactatagctgggcccagaaaccttgcatttcatgaactctgtttggccattaaatgcccctgtgtctacttgtccctagaatttctagacttctgtggacaaaaacacgcagaggagacattaaggcaaagagcaagggaggcagtcatagcaaagttctgtgcaacaagcaaaacagaatagcctcagcagagtgatagctggcgctgcaggaggcagaagagccggggttttgcactgtgcagcacgagctgtccgcatgcgcagccagtgacacacttcttatgcatattaaataacctttagtagaattattatttatataaattaattcatgaacgcactagaagttgtatcatatatcatagttattattaaaaacctgtttcaggggctagagagatggtcacttgttaaaggtgcttggtacttttgtagaggaatgaagttttgttcccagcagccacactgggtagctcacaaccacctttaactccagctctaggggctcccaggtcttcttttaggaatctgcttggtacctgtacatatacacacatacatgcacatagacacatgcaatcaatatgtaaataaataagaaaatgaaaatttaaacaatcggcttaaatgtgcataaagatcacctgggacgcaaacatctctgttagggaattatgaggctaacatgacaccaggttatctgcagtgagtttgtgattccacttacaggatattttaaaggtcaagcaagtccccaggatgagaagagactttgtgctgccacagaattcataagtatgggggcatgcaatatgcagaactatgcttttcgggcccaacgctgagaagaactctcagggtaacttgactgctctcagatgcaggaactgggtactggtgcatggtataatagttactgcactgtctaaacaaaacgaaacaacaacaaaacaacaaccaacaaacaatcaccccccccccaaatctgccctatctatttatctttggaaatgtcagcacactctattaaccagtctaaagcaggtatcttaaaatggtcttttgctgtttcttctttgcttttataaactattacagcctgttgatcatatcccctttatgtctcttgaatactgctgggattttacacttcctcagcataggaccctattatttctggtttgtgtttattattattattattctttaatctttttatttttacagtccagttgttatcctcctccctgtccaccttctgacagttcctcatcccattcttcctcccctgtctccaagagaatgttcctcccctataccaaagttaaaacaagagtaggtaaactatctaaacaggctcatataccctaaggaattagaagatgtcactaaaaacctcccaaccaaaaaaaaaaaaaaaaagcccagggctaccagaccttccaagaagacctgataccaacactcctactaccccataaagtggaaaccaaaggaacactacccagttcattctatgaagccacatttactctgatacataaaccacacaaggacacagcaaaaaggagaactttggactaacttcacttgtggatagtgatgcaaaaatattaaataaaattcttgcaaactgaatccaagaacacatcaaaaccatcattcaccacaatcaagtaagctttatcccagggatgcaagattggttcaatatacaaaaatccactaacataatccactatataaacaaactaaaagaaaaaaatcacatgatcatctccttagatagtgaaaaagcatttgacaaaatacaacactccttcaagttaaaagccttggagaaatcaggatttcaaggcccatacctaaacataataaaagcaatatacagcaaaccaacagccaatatcaaattaaatggagagatacttgaagcaatcccactaaaatcagatataagacaaggctgcccactctctcagtatctattcaatatagtactggaagttctagctagaacaacaagacaacaaaagagatcaaggggatacaaactggtgtgtgtttttttagttcaacttgtaccaattctctttgtttctttttatgttatagacaaacttatcatcccccttactgatttctttatcagtttgagagaacacaccttccattgttccattgtgcctggcagctggctgtccttcagtattgtcaaaacagtcctgtgttcctgacttgaatatcttgtaccttgtttcccatttaagtatttggtagtttattatactgaaaatgttcagttctaagaactttgttcttttctgaatccctaatatatttccagtggaaatacctatctcaactaaattctgtttgttaaacatttattgtggccatattaaaattttgaaaattgttgtcttttcaatgtttttcttgatattactagtagcttcggttgatgtacaaggaaattgaggtgtataggataacatatatttacatatgcaactaaatgtagatactaaatgtagactatagtatgttcaaggaggacaagtaaaagttcgtattagaaccagtataagatataggcacatgtcatgaaagaggatgtatgttgtccttttagtttaaattctgacatgattttttttctggtggtggataagtgcatacaaatatatttgatactgaaagtggaaagcgtgaagctccacaggctcagaacacctgttttgtatggaagtgaaccgcgtatacaggctttggatctagctggctttaatgtttttattttcaactttaaaaataaagttttaatacattttttaaagtaccattgcttaaagagagatatcattaagcaattaagctagaatcatttgttttattttatgacgcaagtattttactacgtagtctagggtggccttggacccctccatcttcctgctactgtctcccaagagctgggatttaaaagcatgtgggggcacgcctggctgatgactgggcgtctcacattctggagcactcctctacccctgcacagttgagcttggtgctccagagatcacacaaattactattatagcttacgcactatcagatcttttacctcgctgtcttctcaactaaattctgtgctttagaagctgggaatataaatttatttctttaaaacttatccacgtatcacttgtcaatagactttatcaattctgtctactactacttttcaaaagagttttattttataaacaagcacatgcattgactcttgcttctgtgggtaaactcttttagaatcatgtaagtgtatatatttatgtatgcaatagacatattcagtgtaaatattgtgtatgtgtgtctatgttttatccattattaaattcccttgtcatttaactatgggattatttaaaatacatcaatactctttacaaaccgatgctttgaattttctcatgatttgttacattatattttaagtaaaaatcaattcccttattttataggggttattttattcattcgtctttggccatgttatggtttcatctcaggatcctacacatgctaggaaagccccctaaaactaagcaacttccatagactgaccttccttttgtgggaggcaaaattcaagggcaaacactcttgcctattctgaggacattcctagactgctatctctctgtctctctttctctagtccctactctcttccccctttgctctctctctctctcctttcctgcctatgctgggaaatcaaactcaagagcagacatatgaagagtaagcagtctaccattccgcccagcacctgtattttaaactaatgatttatcattatgtgtttatatgtaagcattcttgtgtatatcttttgtgtgatgccatgtcttatttattagataataaaaaaaagaacaagttaaaatcaggagaaactttatcaaattaattttgtttttatcagttttatatttccactattcatgtatctatggactcagggacatatatgtacatgattccatatcagctgttcctgcaataaagtgatctttggacacatgagtgtgtatacaggtatgtacaccagtatcatactgaaaatcccaaacctaagaaaaatacaagttcatgtagccccacttttaaaaatgagttgctgggctattgacctaggcaagacttaaaatatacagtcaattctagcgctacaccatgtttcccatcttggcacagaaccaaatgtctttaagtagtagggatactcttctcatctaagacctagtaagagaatggaggagaggttagcagagtgagagagaagatcattttgcagggctcactgactacagtttgaacgttttttatgctgggaattatgtgtaaaggaggttggctcttcgccttcactcctctgataccaaattatgctaacttcatatgatctatttggtgccttcacattggattatgggatttttgagggtagtaggaacttgtattttgcccatctgaagaggctgtgtcaggagcttccccctgcctggcaagaattaagctgagagaaaatgacccttctagcactgtcacaggatagggtaggttccctggagtgaagatgtgaacttgagagaaaaagagagaccttttttagcagtttcattttcaagagcagatgagctgagggtggcagccagaagtgttggccttaatcaggaggcctcacttctaaagtacagttgccaaataatgtggagaaatttcccatgaaagaaagagcatcgttgaatccttctgtggatatatacaacatacaatgatggcctgaggttatgtgctctttgtccttattttttcttttattaagctcttgagaagtcaaaaggaagatttagttaataaggaaatactaccaagaaactaagcatccttacgtttttgctgtagactagatggcacaaggaaggattctaacctttattgtactaaagtgaggtgaagtgaagtgtctggtatatgataaatgttgctgggagtgtgggtacacatgtctgtatgtacttatgagaatgccaagaagggtgtgaggtgttcccctctatcatgctctacactagtgttttgaggcagaatctctcacgaaccagagcttgctgttttagttgtctgtctggctagatagatctgcctggctctgagccccaatactggagttacagtctcgttaggaaatgttcatttatttacatggacactttgatgtcaaattcaggtctttattctttcaaagcaatggcatattgagcaatctctctaacctaacaagtgtcagttaaaaaaaatccctattgtttactaataaatccctaaagagatcttttaaggttataatatcagtaatttaaagtgttacacaaaagcaacaatcatgttgtttgtggataaactttatgtgttttctcagtgtgtccttttcttagcatgtgtatttgtgttgctgaagagccacataccttatatatatatctgtgtactcattcatgtgtgtttgaatgcacaatgccacaattcccattcatatttctgcatttcaaggtttttaaaacagctgatcaagaagatcagcccttagtttcaaataatttttggcaagcctaatgcttttccctgtaattcccaaaaatctatgtggaaacttaatgtttttccttgttagtattctttgatgccttactctttatttttcttgtttaattttcagtccacttaggatctttcagtatagaaatgacagctacaacaggttttcctgatcttaaacttcaaaagctatgaatgaatttgttcccatatttctaaaagaactacggagagtgcacacatgaataaacataagtgcttgcaagtctggtgacagctatggacaggaaatgagtgatttgcacctcaatggcgaatgtctgactttaaattctctcctgtttctgtgaatctaacaaaaatcaaaactattatactcagggttactccacattttttgattcaatttacctactttatactgtatcagtataagaaacttacaatgtaacagttctattgtgtcatatagctacatatacgtgtgtgtgtgtgtgtgtgtgtgtgtgtgtgtgtgtctgtgagagtgtgtacgtgtgtgtgcgcactcatgctatctttagtattcttttttttttttcagtaacaatgtagactctcaggtacctcattctgcttaaggaactttttaaaggaccttattaatttaaaacaaaacaaataccctgtgataatttgattaaaatggaactaaccatttggacaagttgaactttgaaattagattttgccatcttattaaatggtttgacagttattcacctgaatcttctcgttgaagaaatagaaatctttctagtaagttcaggaatatttcggacacttcttccaatttagtatggaagggatatgagctgaaatgaaataggggaagactgtggtgtgtgggtctgtcatagtggcttaacattacgagatgggaagtgaactgagggttgaatggaggagtattgtgaaccaacttgcttcgtataggtctcactctcttttgtgctgtgactagaccatggtggtaaagattaagggtagaaagaaaaatgtcaagcttggggacactgtggcatgggatgttgccagggtcatggagggtggtggcagtaaagggggtaaatgccacctaatcccgtgtctatttgagtaataagacaaaaatgcctctccctggctgtatttcctctcctacttataaagaatacttttaaagaatattcattccataacttgactgctgacctttaaaattttgcatattcccacctgagttcttttattaacagaactgtcttttcttagcctttaagtaaactcaagtctttgtagaaaattttgagcatttcatttgattttatataactatggtttaaaacaataaaattaagagaatgtggttttggccctgaatttgttactcatttacattgtgataatcatactatctttgcctatagatttatgtcccagtgaatgacccgaacctttcctttagctaaaacatgcacactgtatataagctgtatattaaaaagatgtaattaaaaatttttatttgagtaccttaaaatatcaacaggataggacaccttgttgttgctgaaaactacagtgaagaaacaagaagagtctctgtggtggtttgaatgtacttggctcaggaagggggactcttaagaggtatggccttgtttaagtcagtgtgaccttgttgaaggaagtgtgccactttggagatgggcaatgagaccctcattctagctgtctggaagccagtcttctcttagccaccttcatatgaagatgtggaactctcagttcttcctgcaccatgccatgttcctgctttgatgataatggattgaccctctgaacctgtaaaccagccccaattaaatgttatccttataaaagttgccttggtcatggattctgtccatagcagtaaaactctaaataagacagttcccaaactgccttcttgtatattgggtgacagtggtctttctggtagcattatactataaatttctctgtctttggtactcaaagtgtgacattgtgatgcttgatttaatggggcatgattttctatacagtgggagttggcttctgttttcatcttcctctacctactctgagagaacttgttcaggaactttgtctcccttcctgtcttcctgtctcatttgtttatctcagaagcccaattggcatattgacattattttaactctacatgccactctacatgcagctattcatttgacatgagcatctatctccttatgaggcactcttgttgatttttcctaagcttcctctcttaggctaacaatttggtacccatgttgactcaacagggagccattcctgatatgcagccatttcctcttgcctcctgagtcacacaatgcatcaatacattgattctgtgtggtggtaacgatccctcctttctgaaacaaactaaatttgcttgcaaataaacataacaatattgttttctccatgtgaagggtgttacatttatgactgtatttgtcatagagagttgagagttaagataccaagaggctgaacaatgaaaggtaggaatggcttgttcttgcaaatggaaagaaatctagcctcatttagctaaaaggacaaggcctttctaatcacacagttgacatcatgaccaggccagggggaaaatgtacctgctcttttataattgtctccactcacagaagtggatttctcattgtctgtgcagctacaggaaatattgttaataaaagcacatgccagtctgactgaagctgttctataaagctcggctggaccactctgtgaaactgttatttcctattctgaaaactaaatctcgaatcacggttaaaaggtaatcagtctttgacagagtggtcttgaggagaggaacagtaattgagagttgattggtgtcacaggcttttcagggaacaatttcaaagtggaacagtggaagagaagcaaacacacccaaatggacctttcctggaatttttttttaggacaccaggctacattgataaatatattgaatttttaaaaatgtgtctttcctgaacaatacagacaaaatactatgtttttagacttcactgctttgacccactgtgacaaatcttatgagacagtctacaggtcttatggccatcttttgtagctgagggatcttaccaaaaccttcaagatccactgtcagtggtagggctggcttagctttcctgtctctggcctgcagaactaagatacaggttggaaaaggtgttgtgtgagcatcattttcagtgaactctctcttctgttctttgcatagatgttgtgcttgcttctaccattggtaacaatattatcttcctctttgtataactagaaagaaaaaattctaaaaaatagtacatttatgtactatatgtgtgtattctaaaatatgtatgttgctcacttacacacacacacacacacacacacacacacacacacacacacacacacgtactcacacaactcaaagggaattaatatggcttcacagaatatataaactttatgagtttaatttacaaattttatgattcaaaatgaaattattttgtttagaaaaagtacagtaggcttagaaacgatagcatgtttagatacaagtattttcttttcacgcactataaattgtgagacattgttagaaagaaggcgttttatacttcctagcagatttatagctgtgcaggctaaagaggtcaaccaggactctgccacgagtggaggcagatgcttctcttgctgctctgtttttctctgagcatagtgagaagtctgcaaagtcctcacttcactgaagagaatttgaagggcagaatttgagtcaagtaatcaagggaattacaatttcattggaattttccagcaatgtattatttttgtgacaatttatttggcagtattattacccgtgtacttgtcctatctgaagatctgaaatattctgcacagccaaggctatgctctgaacatatgtagaactattctcaagagatgcttagtgtttgtctagtatagaataggagaaggaactttgataatgtaaaaaaatatctcaccgaaaacattttatggacaaaattcacatgattttggtgcaaagctaaacattccccaggcatccttctcttccgcacactcaccatacttggttggtttaaatacaaagagacagcaaaccaaaccaaaaagaaggacaacagtcactcctgctgttagataggtcacggagaggactctgattttctgtttctttctaagactaattttgaagccttttaaagctttagagcagataactgatatgggttctgttgaaagaattgccctgattctaagaaatctctaaaccattaacattagcaatgtccagggccatggggctttgtccctacagccttttctgctgttatatgccaatcagaaccttttgattctgaaacttacttgataatatttagactcctttaaagcaaatacaacttatttctctaatatttcattactttgggaagagacagaaattaataaggattaaataaaatagctttgactaagcagaacttataaattctaaacatgtattgtctgatcacactaaaaagagaatctccactgtgatcattaaatttttatatcttttaaagaaaatattcagggctaaattttttaaagggatttattttcaagtagagtgctactatctgaaaatctattttagtgccttgtatttaccagtaaattcttattcttaaaggtctgggtagttgagaataaggcaatgattatgactcccatagggattggaatttatattgggcatctaacttcctgatactcaataataaaaggcttctgaataagagttagagagataattcagtggtatagggagcttgctgctcttcctgaggatctaaattcaggatccagcaggtgatttacaactacctgcaactccagctccaggagattcattgcctctttctcgcttcttcagttgcagttgcaggtccaggtggaggtccaggtgcaggtccatgtgcaggtccaggtggaggtccaggtgcaggtccaggtgcaggttcaggtggaggtccaggtgcaggtccaggtggaggtccatgtgcaggtccaggtgcaggttcaggtggaggtccaggtgcaggtccaggtggaggtccatgtgctggtccaggtgcaggtccaggtgtaaatgcagttgtagttgtagttaaaagtgcaggtgcagatgcaagtgcatcacacacacacacacacacaataaaaattatataaaaaagaaaggaagactacaaagtaaatcagaaaatggcactagatatttaacctcaacccctgaatatgattgttaggaaatttatcactctttcacctaaatcacactctgacttcttgaagaaaggcgaccagtaaacaaggtcaaagggcgattgagtagcaaacatatgctgtatgacagaaatagtacaacccttcagcttccatgaagagtggtttcagggttccctgcacataccaaaatctgtacatgctcagccctctacccacaatagtgtagaatttatttagaagtcacacacatccacctatgtactttaaaacacctctagactgcttatattactgaaaacaatgaaaatattatatggaaagttacaatactgtatggctatgggaataatgaaattaaaataccctatatattaagtaaaatcttttattaaaaagttcactctgatcagttaaatccatggacagacccctggaggtagagggtttactgccccagagagatgtatggaactatggtccttgcagatgttgctcacatttcaagagtaaaggactgtttcttaaccggagaggaggattggccaatggacccccagaattctgaagattaacatttgtggagtctagggtctatcctctgtgcaggttaggctaacactaagtgtcttacttaggctacaatgctgaacactaattatttgccttttctattctggatattatgtctttatcaggatataagctaccttattagccttatctgtcatatctatctatgcatccatccttctatcatctatgtatctatctatcatttcaatcaattaataaactatttaactgtgaatcatctattgcctacctacccataagttaacattctattatttcccctttataaatgcttgctagagtgttttgggaaagatgattttgatacatttgagtctcccccccctccccttccctatttacctctccctttctctctttatgaagaatcacaatttttatttagtcatggtaattattaattttaggtaaaatatagtctctattcccctcaattttctgattaagtatagaaggataaaagtatgttttagagttgctgtgagaattaagcaatttcatttaggaaaagtgcttagaataacatgaggaatataataaattcctaccagtcatgagaccaggcaaacttattttaaatacttatgttaaaatagacaatggatgacagtgcactgaaaatcttctacacagcaaacaaagccaccaagtgaaagggcaccctatagaatggaagaaactatttacaaactctacatccaaaaggcactgttctccattttcaacagaaaggaactcttaacgagtcagtagcagcagcaattaaaatgaagattagactgtgtgaaggcaagatttggagacaaaaaaaaaaaaaggaacagcaggtatcctatgatctcatgtgtaaccagaacctaaaaaccatctcttaccgtttggtggtgaaggggttgctcttagagtctgaggacaatgagaaggattaggaaggttagcaatagttaacaaaggtgcagctatgcaaaaacaagtaattctggtgcgtttttgcacaataatatacttaggatgaagcaatgaactaactgtacattgttggggctaaaaaggaagaattttagaaggttttttcatagggaaatgagaaatatttgaagttaaaggtgtgtaatctaatttaaatatatacaatgtgtacatgtatcaatgtgacatatgtaactttgatggttttatgtactagttaaagataaagactaaaatgtattaatattcttatatgttaataagcatatcctttaatttttttataaattttggttttatattcataaaactgtgtgctgtgttttctggttgcttcatagagccttcacagcagttgataatgttgtttatattccattacactgaatattccctgaagcttcttgaagcaatgacagatggccaagcttttgaaggaatggtgatcctatttacttctcaaatatgtaggctgcaaagcacacactaaaggatatttcagcctgttgttacaaaaaaaaaacaaaaaaaaaataacattacactttctttcttttttttttaaattgggtatttatttcatttacatttccaatgctatccccaaaatcccccacacgctcccaacattacactttcaatgttgtgcacagaagtgtactttaaagatggacatcacaggttacaaataaaaaaagtgaagtgtctaatgggctacttacagctgtcaaagttgttgatattattgtggaatatttacattttattgtcaaagctgtttaagagaccccaccctcaccaagggcatttgggtattagaggataggactccttcagtgccttcaatactacatcaagcctgttgatggaactatagatttccatgaatgagcttagtatataattacaaaagactgttaagaatatgtagtaatacattatttatgagaaacagtcattaatcctctcctataaaaataactcattaaaggtatttttatgtttattctattctggttttgttagtgtttttaaggcactgatatttgaataagtaagagaagagtggccaacccttcagttgattatttgtaacttagcagagacattgtaatgatttggtgcctgaattcctttcatgtgataaatatcagaccaagtcatgtctgaaactaagccagtatgggattgcttatctgtaatcctagaattcaccaatctgaggttggagaattttgagtttggtgatagcctgtgctaactagtaagtttgcaagtttagagctatcacagggcctcagttaagtcttgactcaaaaagcaaataagaaatcaggggtagggagtgcaagggagggggaagcagatggggagagaatgtgagagagaccataaaaagttttcctttaggtgtacagatgtatagatcatgagannnnnnnnnnnnnnnnnnnncaaagctgtttaagagacccccacccctccaccaaggggcatttgggtattagaggaataggactccttccagtgccttcaatactacatcaagcctgttgatggaactatagatttcccatgaatgagcttagtatataattacaaaagactgttaagaatatgtagtaatacattatttatgagaaacagtcattaatcctctcctataaaaataactcattaaaggtatttttatgtttattctattctggttttgttagtgtttttaaggcactgatatttgaataagtaagagaagagtggccaacccttcagttgattatttgtaacttagcagagacattgtaatgatttggtgcctgaattcctttcatgtgataaatatcagaccaagtcatgtctgaaactaggccagtatgggattgcttatctgtaatcctagaattcaccaatctgaggttggagaattttgagtttggtgatagcctgtgctaactagtaagtttgcaagttcagagctatcacagggcctcagttaagtcttggctcaaaaagcaaataagaaatcaggggtagggagtgcaagggagggggaagcagatggggagagaatgtgagagagaccataaaaagttttcctttaggtgtacagatgtatagatcatgagaaataatttcttctttgataaccaaactttaatctaattgtttgtaaagtttcacatgtagtatagatattacagagatataaatagctaaactgataatagagtgactgactttctagtctgatggtttaaaagtctcacccctacctgggtaaagtaataacagtatcatatactatctgaaaacacaccagagcactggtgggatgctaatcacaatataagtgctggctctacctcagggaggggttttcctgtgtcatgacaatctctttttaagggccacttcatagatatttgcatagttaaccaaagatttgtacttcaaactaatagaaatgagtttcatattccttgtttagtctcttttagggcacataaaattccctaaggagtgcctgtgtttaaatgtgtgtgtgtgcgcgcgcgtgcgtgtgtgtgtgtgtgtgtgtgtgtgtgtgtgtgtgtggcaatgggctatgcacagacagtctggcctcaagtttagctgaggtagaaccccggtggtggtaatttccacctacatgggtcggaaggcgttccttctcttggacccctggctcctgtcgaagttactgtccccacagccccctcaagagaagcgtgtggctagtagtcacacagataatgtcccaggcttctgaccttcaggctagactcctctcagttatctagcaacagcaagataacacagcccactgtaagaggggctgcttggttcctccttgctctcttaagcttttacttttcttactctccttcttactctccccctcttattcgagcctttcttctctccctcctttttccccttctctcctcttggccatggccggtctctctctctctctttctaccttttctctttccccctgtctttctacaatgacgctctaaaaccatagactgtctctgtttatcaaggcccgcagtgcttggacgatgggataggctttctcctaatgagccgtgcctaatctcctgccagaaggctttcctgtgctccagccagaactctcaactgcgtgggaaccttctccccctgctctctcttcccctgtctctggagctgagagtgtcgccctgtatcccttactctgttctcagctcctctgccatatctagtgtgggatgctggagactgagaccctggtactgggggctgccccttgtccaccctctgccgagtggggtcagtggctttatacagccagatgaccacctgcggcttagtggaaagtgtatgtcagtcctcccgtgtccgcctgcccagagcacaggaactctggacagaaacgggctctctccctcccctatcccctacccccacatactcacagtcccacgtgtgtgtgtgtgtgtgtgtgtgtgtgtgtgtgtgtgtgtgtgtgtctgtgtgtgtgtgtgtatgtgtgtctgtttttgtgtgggtacatgtgtgttgtgtttactggcccgggggaagagaatgtagtatgttgattgacagtcagtactacacattctgtcctggagacagaacatgaactgagtagcaggatgtattctatatgagagcaaaatcattgcttcaagaaggaaaatgagctctggggagacacatttctagtaaagaatgttatcttcagggacatattattttttaccttaatcttatttcatgtggttgggtgctttgcgtgagcatatttgtatgatcctgatacactgagaggctagcagaggatgtcaaatgctaccccctcctccagtcatctgcaagagcagccagtgctcttaactgctgaaccatctctagtctccaggaaatattcttttataacaattccttatgaaattctttctttttgagaaggaaagctatacagagtagtatctttaagggcactaagtttgaaaagtggccaattctaaatgcctgtcatcaatggagcagctagaggccagagaggttgcaagattggtcctccctcaaacagctccacatgatttagcttccatttgaaaggctcaccctttttatagaaaggtgaattacaggcatttattcagaccattactacaccttactatactgcattagaaaacaccatttttcatatgagtccttcaatgcaggtgttttattcctaaaagtatggcatatatttttctctgatttaaattttatttgctaagtaaatgagcaaagcaaaatgaatgaagaggtgattgatgattgactccatgcaaccagaagccccaaagagtatgctaatctcattatcccaatagtgatttgaacaagctgcctatgtatctccattcggagaggcaatgcaagctttaaaaacagttcaaaactgttaaatcatcaagagctctgaggtaggaatgatgccacagggaatgtgtctgaagtaaacctctacttaaaggtgcagtttatcattctttaatgcagagagaaaaatcagtgtgagggaagggctttcaattccttctaacagatgataaagttgtgaggaagagcgattgagcacttagaggaatttgccgacccctgaaagtgctcagtaactatcattctgactattgactgatcacacagaggatggctgtattttgactttctgtagaaattttgtctcgtacagccatgtctgtttctcaggggagaggggattttgtcagtattctgtgtgtaactcctgcagatgtataacaggaagtggctcctaagttagataaatctacttctgtgcaagataataaaactgactccataaatagaaagttgggttcaagtaagtgaataggtgttatctcttttctcttctcttctcttctcttctnnnnnnnnnnnnnnnnnnnnnnnnnnnnnnnnnnnnnnnnnnnnnnnnnnnnnnnnnnnnnnnnnnnnnnnnnnnnnnnnnnnnnnnnnnnnnnnnnnnnnnnnnnnnnnnnnnnnnnnnnnnnnnnnnnnnnnnnnnnnnnnnnnnnnnnnnnnnnnnnnnnnnnnnnnnnnnnnnnnnnnnnnnnnnnnnnnnnnnnnnnnnnnnnnnnnnnnnnnnnnnnnnnnnnnnnnnnnnnnnnnnnnnnnnnnnnnnnnnnnnnnnnnnnnnnnnntccctccctccctccctcctccctccctctctttctctcttcattccttccttcttccttccttccttccttccttccttccttccttccttctttctttccttattatatccacatgtttatttcagcatttcctgtggatcccttttaacaatagttttagacctaattatcacaccttatacacacatgcattgttctgagtcaggggcatgaagttgtctcaagggagacatgtacattactctgtgtcaagggcatggagtggttatgaggagaaacaaggaacagagtttgagatcaaaactatgtgttcagcttagcttgtaaaaggtgattatatagagtatagtaaggtttattacatcaccattcttaaagtaagttacatttaaacaaactgagaacagagtatatagttttaaatgatctcaaagcagatgattatcttggatacaaggttgggtgatcactctatttgtaaaggcaaggaaggggcattctgggaaaatcattcaaataacacctaagtcatgaaatggccaataatcttttgacaatatcaaaagaactaattatgggtaataattagaaagtcatggataataattgggacagtgtgtgtcgattttatatcttatttatctgagaagctgaaaggttaacacattgctaatgggcagattcttactaatacaagcagggaacatcagcttaagcagccagacatcatgatctatagcagccaacaagggcaaggactttgcgacttcctttcaaagaaatttcatgaaggtctggacagaatgaagcttttactccttctgacatcatgccatatccatgctccctgggggatattacacttagtgccattagttttctacatttacacaggtactggagagtcttgtctgagacaccaccacatctactcaggtctagccattggacttcaggatgcaatacctaacctatattggaatctgttctttgcccctatgtgcagtctatctttgatgttgggaggcaagtatttaatgcttgacccatattggaaaatgttgatgattaggtgtctaagacagttttggagttgactaacttggtcatgatgtaggtaccatggctgttctccatagggtattatttctttatcctcccacccctttcacttcttccatttgaaagtaaagatttttccatctgaatggcttttaggactagactttaataaacacttcaaagtagtctggtcggatgaaatactgtcatacttcactttctaaaaataagatgcaaaactacacacaaagaaaatgaagcgttatgcactgttgacttccttttaatgaaagaaatggtttatagatgacaaaggggattactgtcatacatgtcttcagtattctggctgctctaagggactagtaaattaaaaaaaaaagttaaatgtgtgagaaacattccaagttcagctggtaactagattccttggaaagcatctctaatgccatttaatagaagtaagtaaacagttaccaactggccaaagtcaataaaaaaaaaaaaaaccaaatatatactcgttataggcaatcaactccttggttgatgacaagtccctgggaggtctggggcatctggttggctgatattgttgttcttcctatggagttgcaacaccccccccccaccttagttccttcagtcctttctctagctcctccattggggaccctgcattcagtccaatggttggctgagagcatccacctctgtatttgtaaggctctagcagggcctctcaggagacagtcacatcaagctcctttcagcgtgcacttcttggcatccacaatagtgtctgggtttggtaactgtatatgggatgaagccccaggtgggacagtctctgggtggcctttccttcagcctctgctctacactttcttagtaatagtgagcagatccgcattgctatgatcttagttccaccacgacccatttctggtgggaaatttcctgtggtaggaaaactagtcattcttttagagaaagctataaaatcccagctgccatggtcatttcatatgtaccttaaagtgaaaatgcactctttgataaatcatccccttcagaaaacccaagtgatgtttgcaataagacaaatacccactcatcttattgagcaaactagtctcaatttattaagggagcatcatgcatactgaaggagtcagagctcatagggcaatggtgatgagcccccatctcacttgatacacacagttattgctttccagtttctgttcatatgtgttcctgtgtgtgttcacctgtgttcatgtgtgtgagtgtgtttgtgagtacacacttgtgtggagaccaatgcttgacattggatgctttctactaacccccccccccccgcccccgccacactattctttgaggaagatctcttggagatcctgaactcactaatccttggctagactaattggtcaacaagctctgggaacctagctctctttcctgtcctgagtgccctgtatttttaaatggatgagaaggacccaaatacaatttaggtcctttactgacaaagacatctccccagcccctaaagtatttggtcatggtccaaaagaatgatcgaattagcatactatttttataatagcaacattgtttcaactttaagtgtaactatttgaataaaaatttaatatttcttagcttattctttcatgtgacaattttttgtttcttttgatattttgagaactaaaagtttgagttgaaaatatgctttattgttcatgtctcaggtattattatgaagaatgtttcctagatcaaaggtgctataatttcagttgaatcaatcaaccctttcacaggtaggcattacaaagtataaagtaactgaaaataaaaggaggaagagggcaaataagctaattgcagagataaaacaataactgaaattatttgctattaacaaaaggcaagaaataaggtacaaaacaaacagaacaatttttaaaatgttgtatatttaaactccatcacttcagttaatattaatgcatatgggtaggtacttcatctaaagcccaagacagactgagtaaaaaataacatttcatggacatttcctacagaaaatacatgggaaatataaaggtatagtttcaaattcaaataatggtaatggggagtggggggggggagtaaatgctgttaaaatactatcaaatactcttcaaaagaaagcttagaagccgttcatgacaaggaagattccacggaaatgaatatagctgcacatagaaaaagaaatcttatattgaggaaatgctcattctttgggctgataccgtggttttaatgcatatacacctaatagtttgaaacacaaaaataaaaacctgttagagaaaaatgggtaaattcacagttatagctggaaattggaacatgcctgtaattggtggaataaaaaaaagaagagtgtgatggtttgaattaaaatgcccccatgatgacttgaataaaaatgcccccataggttctctctctctctctccctctctgtctctctctctctccctccctgtctctctctcttcgtctgcctgtagattattatgcaatccccagctactgctccagcactatgaatgttcccaagctcttatcataacaatcaactaaaccttaaactgaagtaaacccccaattaaatgccttctttgtaagagctgtcttagaaatggtgtctcttcacagcaaatgagctgttacacacacacacacacacacacacacacacacacacacatacatacatacatacagagatacagagagagagagggggggaagaaatagcttatttaggaaaaaaattaaaagttgcattgattttactggaacccccattcaaaaccatgcttttttgtgattctttgaatattcattgagaattctaacttatatctacattaattatctatttttatgaaaattattccaatagatggaaagaaatatgttcattattccacatttcctgtgagttgggaatcagcaagcttgcgtgaatggcgtgactaaggatcttacgatactacaataagggttacagctaagattcccctcatcggaatctgtgtttctaaggtcatagtgtgccaagccaggacattggtgctgaaactcatggccacatccacaggcctctcacagaactgacaacctgttagcaactgtaaaggagatgaagtctataacccaatttcagcaaacctctcaagtctgcttaatgcctctattagactctagttcctgatatcaacctgctgtcaaagtcaggagagtgagtacatgtagcagtgatggctggggttatcatgtactaggctaaaacattaaagactgtttacagatatagacgataaatggataaaccacagatggtaacttcttttaatacaataggactaactagaaatcaataatttattgattcaaaaacattttgaaaattgcctgactatttggctcacaaggccaaattctaaacaattcatgtataaaagacagaaattataaaggaaatcaaaaaataatttgaatttttaaaaaacaaaaatcattataattttatagtacagctagtatgatgttttatatacattgataattttaatttctcttgacaagtctgtcttctgccttaaaagtgctgaagactagaaaagagtaaataaaaggaattaatcaataatgagagcagctgaaattaaaacggaatataaaacaaaattgtagccaagttttgaaaaaaacaaaagaatacaaaaaaaaaaaaccttaaaaggctaaattaatagaaaaagatacaggattgtgaaccagaagaactcagtgttgttatctgttatttgtctcccatctttatgtatttattatgattcagtaaaaattatgattatatatttattatgattcagttgattttctgatactagtaattgacaaattcatattaaatgcaaatggtaatattaagaaaaccttaaatagtaaaagcaattctgtaaacggaagcaatgtatagacaaaatatcattaccaataaacatatagtgatcaaacagtgtggcacggcataagaagtggagtaaggaagtgtcaggagacactgaaacaagtccacttgtacatgccaacaggctttcaacagagtctccatttgattcaatgggcaagtgcatcctctttcttaaacaacagttgtttggggctgtagaaacagttcaggatgcttactgcccttacggaggccccaaagtttgttcccagcacctacactgggcaactcatgagcacctgaaacttcagttccagggaataccatctgctgacctccaggcactggacatgtagcacacaccctccctctcccctccccccatacgcaaataaaaataaatgaaaataaaaagatagtctttgtttataaatcagattctatgggaaacagctcacccatagattgaaaaatactagtttacctggacttgatctaaatgaagagattacgatctcaggcatgatctgcatagagatggggtattgagagtttagggagattggtgagcatatttccaatgtgggaggaacagagatcatctctggctaaaggataacctgtggtttctagtctccaaaaactggaccccatcactgcctgatttctcggctctgtatagttgtctcctactgtgatttgggagtgaaatgtcccccctaggcacatatatatcaacacttggctcccagattctggtgccatttaggacagttgtagaccttgttggagaaagaggggttctaagggagagctttgaggttttatagctgggtcctacttcctgtggtccactctctgctttctaacggtgtatacaatgtaaccagtcagtctcctgctcctgccagggcactttccctgctattatgaaatgtatccccatgaactctaaaccagaataaactaccccttccttttattggctcttgccattttgtcatacaatgagaaaaaaatgactaatgcattttttaaaattgggtttgcacttttcatgtgatttttcaggcaaccgagctagggtgaaagcatctttcctccggtactcctaataagccataaaagttgggtagtttctcctttgttcttcactttccccatctgccatgtaaaagagtgagctatttgagggtcaactgtcagagcaccctatcagtgcttagctcttttcaccacattgtccggcagagaatgaaacagcatggatgaaatgtccaagtaaggtttccaggaactgggcgtggttccttcaaagttgtccaaaactgtgttcacagccactgactagatcttgggaagatttgttacactgcaacagataactgagctatttaagtcaccgactgtgtaagaacgcagaatgatgtagattttaaatgaataaatgtgataattatgtctcactctaaactttggtcctccttaaatatttttgtatatcaaataatgatatggcaactagatttaaagtcacacagagtcattgctgtattaattatgctttaggtttcctagcttctctaataatgtggtttttcataaagtgatactttaagccatttatagatcttggcaggcaaagagatagcagatgtcatgcctgtgatgaaaatacccataatatgcctgttgtcataagaggatatttaaaaaatcttaaagcggaagtttagaattgtagaagcttatcaggcatagaaatacagatatttttaaacaaatattttttaaagatctctgaatagttttaacagtgctcagattttaatggcaaaaattagatgatgaggttcaacatgctctaaaaacataaatctttcttttggaagagacaaggtttgaatttggcagtaatggtttatcaggaatatgtctggtgatcagaaacctaagacatgcctctaaaagctgtgtcagccagtcttagtaccagtcttgatgccatcacattggcttctgtgtgtgaaactgttatgaaaaaaacctacattctttgtcttattccccaaggaagtatagtccaggctcaagttcttattctcttacttcaaaattttcaaattatccctagctttttagttatattttagccatttgaatcatgcaaaaagttaatcaggggctttaaatacttagttggtgttaacatatctttatatacaaactgacattaaattatggaacttacccagctctatcacactgatttaacttaatttcattttttctaagtatagcttggctggtgaagccagggaggggctaacaggcttagagtgtgtgtacagtatttctagaatgaactgtgcacccccagctcttagtgacccatataaatgaagggatcagatctctactattcaggagaccttcttacagtttcagaattccttgagagtgggaacattttaataatttggacttgagagatagaatggctgtttgcaaggaagagccatgtgaatgaaagtctgttagcaagaatgctgggtacagagtagagaagcttcaaaatgacatcccaagtacacgtgagtgaatctggctgtacacaaactaagtgctagagccaaggatttccagaggctgacatcaggagcttcatcactaagcagtaaaacaaaagaaaaaaaaaaaaggatgtgtcctgagctgtaagaacatttcctcaaagagcctcagtatacagatgaaagtcatctttgtgaaatgggtccatgagtgtattcatttcccccttgtatgttgggaagaaaacctcaagcaatagaaaacttccagaagtgtgaataatcactaactatgtgaaacactgcttaatctaatggaaattcaagtctatgcaaaaattaaaatgagaaatttgaattcactggatacacaatgaaaataaaggtgaggctaagccccaagagagtaaggacacatattctcgaacaccctaaaggtgtgcatttgggcctggcaatcctactgaacaattatttgtattagagaaagcattatatacacattcataaaagatcatttttggataacttcaaattctgaacatgcgcaaccagtccagatgtctattgatggatgaaaaattagataaatcaaaggatggttccaaatatttaaatactaatgcaggtgggggtgtattttaaaatagtaaatattaaaataagataacttattaagtgaaaaaagcaaattgtaaagcaaaatatacattgtttttccatttgtaaagaaaaaatcacagtcaaaattatacgtttcagtttgatcatatacatctgtacatgatatcacatgaccaccatgtgtgtacacacacacacacactgagttatttgcagtaaccctgtggaaggaggagagagaatagaggtaaaggctgtgaatacatggattcttatttatttatttatttatttatttatttatttatttatttattataagtacactgtagcagtcatcagatactccagaagagggcatcagatttcattacagatggttgtaagccatccaccatgtggttgctgggatttgaactcaggacctttggaagaacagtcggcactcttaacagctgagccatcttaccagcccaaattcttttaattgcaaaaaaaaaagcaaaaaaagaatggaaaaaaaatccatagtgtgactttaaagaagtttgtttttgtctcaggtgaagcttaagaatattggaaacaattagtttcagagtttcagcatcttatgtgaggctagtgactgctatgaaatttaaaggtattttctaatgttcttcatttaatggagcagagaaaaaccttcttgcagctgtgcaataagcatgaccacagtagagggtaatgtctgagtagatggcctgtaggctggtgatggcctgtaggctggtgatggcctgtaggctggtgatggcctgtaggctggtgatggcctgtaggctggtgatggcctgtaggctggtgatggcctgtaggctggtgatggcctgtaggctggtgatggcctgtaggctggtgatggcctgtaggctggtgatggcctgtaggctggtgagcatgttgggcaccactgtgcctctccttcacttgtgcagctcgatattctctatgatgtttgtcagggaatacaaagaaggcattaaagtatagcatttcagacataactgaacaaaggacagacccttgttttggcattaatttttgtttattcataataaatacaactatgagagtttaaaacaacctccttctctgtttaatgtacagaaagcaaagggccactagctcaaaccatttggccaattctgtgggatccttaaaaatacatgttctatttacatatattttacatgttttgttccttactaaaatcttcatttgatgtattaccttaaaaaataaaatagctaccaaaagtagtagtataatttttactttctggttgaggtagagctcaaccagaagttagaaagcaacttggccacagatctttgcaaagcaaatgtgaattcacgttatttgctgacagtgcgtctgaaacccagaatatttacatttcaaaaagagcacagcctcattctatttcaaattggaagattccttagggttgatcacctgttaagcaaaaatgctgggcgatactccctgggagctaaggctcgggctgccaaaatggtaaacctcccagtagaaagcaataggaagaaaactttagcattctttatcaggtaatttcaggcacaatgagtaactggaacttctgtttgaaaacactttaatgtttttggacctgttaggttcctgatctgaataatcacacaaatatataagaaattcagctaattgtgtctttttaaaaaaaaattaacttgaattttaaaatctaattaatactctttgatggcttcattctcattctgcctttgttttttcataaaagaaaatctcctagttttttcaggaagaaaatacatattcgaaaaggaggcattgattagtatctcaagcctattgttttctttgcaaaatatgattctctttatgtaagccaaaaggccctttagactaccagactggtgatgaagcaaaaatatttgcactttgaagtcaggggaaacagcttgctgggttgacagaggcaagggggagggaggtgtacctggagtctctaacaaatcaggaaacacagcaagacatttaagtaaattagatgggatgggagatgaagccctagaatacaaatagttagttaacatttgtttcactctgaaaataaactttttccattgaatgaaaaaaaaaagtgtaatcggtgtagatggtaacatcattaaataactactccgtggggcaaaatgacatgtgactttgtctctatgtgttgtttgctagacacgggttctaagaatgggaaatatattcatgaacatttggggaaaactctttttggcagtttggataggtttggcccacatagtttcatgtgtttgactatgtggcccacaggaagtgacactaatagatgtggctttgctggagggaatgtgtcactgtgcagctccagctctgcccagtgtatcgaatcagtctcctgtggatcaagacgttgaactctcagctcctctagcaccaagactgcctacacaatgccattcttcccacatgctgataatgcactaacccactgaaatggtaaacctgccccagctaggtttcctttataaaagttgccttgtttaatggtatcgtttcacagcaataaaaaaccctaaataaaacagtctgtcttaaattatcttagttatgttgtgattgcagtgacaaaaagctttggccaagacaactcatagaagaaaccatttaattggattgatagcttcagaaggttaaaagccatgatggtggaacaaagccatggtagcagcaacagctgagagcccattgtattgttcttcaaacaggaggcagaaagagacacagaaggaatgacaggggtcttttgaaacaacaaattccacacccagttacacacctcctccaataagtccacacccttgatttattctcaaacagttggaatgactgggggccaaatacactgagccaatgggacattctcattcaaacttccacatcagccatcagcaagttccagttattgtactggacctgttgaatatattttatacacttacttacctgaaaagaggaaataaattgcttagaatttgagataaaatagaaaagatatatactctacgttcaataacaagctatttttagcagattattaaaatgaatgttttaaaacaaagattttgttacttaataatgcatgattcatcttgtatctatagaacactcttagttactatatgaaacaaacaagtaaaaagatacatgaagtgcataaaattgccgtgaaaatttcttgtgggcattataagtaataagcagatattaaaaaagataatgatgaaatataatgaacctattgaataactgaaaatgtgttgtaattcccatttcaagatgtcatagaaaaagaatttttagttgattttatgtctgtcctaagaatgggaaatatatttatgaacatttgggaaaactccttatcgtggttttggataggtttggcccacatagactcatgtgcttgaatacttagtccacagggaatggcacttaatttattggttatcaggcctgaggatctgactttggaaagctttattttaaatatatgtgcctctgcactgcctttagccaactgatacagcttaactctggattgggcagctatgagcatttattttaaaacattggtaggtttctctgcaattgcatttggattgataacacagcattcaaatacacatgatgcttttccattccctttgcataacttgagaagtactgccttacatttggaagtacagaattacaaatttctcttcattgtttagaaattattttcaagttaaataacatgcaatcacttgtcacaattgtgggcaaacctcaaaactggtctatgaaatcagcaactctattcgttttcatacttgacaacccagcccaatttgaacctttattacgttctcgttctttcctttaaaaagaaaaactcatggcatgattaaaactttgttgtataataaggaggtataagtaagttggaattcctatgcctaacatagctttatatgtgaatttagtcttgagtctgtacaaatgcagagagactgaagaccacttacagttttttttttttttcatttaccttactggatttttgaggaaaagaactgttatataagttataacaatatttttgactttaagagtttgtcttagtcagggtttctattcctgcataaacatcatgaccaagaaacaagttggggaggaaagggtatattcagcttacatttccatgttgctgtgtatcaccaaaggaactcaagcaggtcaggaaggaggaggtgatgcagaggccatggaggcttgttacttactggcttgcttcccttggcttgctcagcttgctttcttatagaactcaagactaccagctgggttccacctacaagtggccctccgcccttgatcactaatgcagaaaatgccccacagctcaatctcatggaggcatttccccaactgaagcttctttctctgtgataactccagcctgtgtcaagttgacactcaaaaccagccagtagagaggtcttgaatgcctcagtaggtgtcctgttagtatacaagagccatcctgcacctgaattagatttatggggttcttggagttgacacaaagctttgcaattcacagtaaaagacattgctgtggtggcctttacaaatgcagacatgaggtaagaatgaaatgaattataaaggcttgctatagttggaggtggttctaatttaatattaaatgtttaagaaaatacatatgctaaaaaagctaataggaagttggagggccattgggaagacactgggagacaaactcattactaatgagcagtagtgtcttggttgccaccagcatttggtacctctatgtagggactaccttagaagaatggcattaccaagtgtgtattttagggagtatttgcaacagatagtggacagcagctaatgtctgggaatgtatgacctactcacactatctttaggtggtggctacttgggaggcagttaagaagtgtatcttttcagtccaatcatatcaggcacaagactgctgaatacataccttcacaaccacttttccatatcagtggtttttaccccaaattaagggaagctaggacgtttgcatcctccaataaaatggaaaggaaaaagaagttaagtattggttagtgtctatggcaaaatatataggaattgaatttggtcctgatttatcccttatttctttattttttaatgtttagatcataaccatattcctttgattattattaaggttttcaccaatgctttttactaatggaacatgttatcttatttaattcagctattggcatgccttgagccacacacactcctttcttttgacattgaagagagccccctctgtatatggctacacagtcatcattggtacaaacactgaactgtccccacatcttcttcctaggattcaactccttgtcagattaaccagggatcgtactagagatagtccttctccaggaattaagagaagccaaatttccccttctttttggagaacccaaccagtactcttggctgagacagtattcctgtattttggtgaaatcatctggcaattctatgttctagaggatacctcattgcaccatcaaccatcctttgggatagtttttaaatatctgtttctcctacatactaagaattggcatcaggtttttctttggcaggcatttgaagaaccacagggaaacatctattgacttagagtcaccggttgctacaaattattcctggatttttgtttgtttgtttgcttgcttgcctgtttgtttttcttcttcctcttatccatttcttctttctacaagaatatttatttttatcttatgagtatgggtgttttgtctgcatgaatgtatacacatattgtgtctatgactaagagtccagaagagggtgtcagattcctggaactgcaatttcagatggttttgagttgcgggcactctctttacaatgttttcccttgccttctttacagtgttcttctccttcttctttaatgttcccttctgtaccaggagagggcattgctactgctgtgggctgcatcaaccttttcagtacttgaacattagagtaccaatgggaatgatccctgtttcactcgattttgaatttctgcctaagttagctcttgttttagtcctccagactcttcctctggtttagcatttttttcttttgaagcttcttacttctctcaaagttgtctacaaaattgctttttccatcagaagaacaaattgctactgtaagtcagccccaattaaatgttgttctttataagagttgtcttggtcatggtatctcttcacagccacaaaactctaaaacatcatcattggtatcatttgtgccaagcaaacaaacacaaaacaaaaacacatcagaaaaacagatcagtgttagagaagtcccacccagagttaggctgtcctgaaatttcatgtgtagaccaggctggccttgtgggctatcattgcccaactccttgtttttctaaactagtgaagccttccttatttctgtctaattaaaccagtttcttgggggtgtataggaatttgtgtaactgtgtcccttttcagaactttctagtagtaaaatgtgagaatttatgttcttttaaaagttttagagcttctctgcatattataaacacttctcagtttagaaaagtcatgtgtcaagccttcagtggtcacttgtgaccaatggttacacataagacagaacagatctctgggaacaaagaattaactaagagcaaagaaaggaggttctttttgaagacctaattacaaacatttgcaagcagaacttgatggttctcatttgtcctgcgtgaggcagatggtaggaaacctaggacaagtacttgttgctgcttgaaattgcttttaacaataatttagtttattatgcaaaaacccagtattgcccaggagcaggtgtctgaaggaaacaccacatctttttggggaattaaaatataactttttaaaaggaggatgttagttaactcagtcaaagatagaaacaatagatctcttattttttaatgagctaaccatgaaatttacatgaaagaacttggtaagctggaaagtactatataattcatattaaaatttagaaatatttttgtcacaacatttcactgatgaccacacttcccttgatgctcttcagtgccacccctccatcccttcctaagaaaacttccctttgaaagaagaaaaattttttctttctcaaaccattttaaatctatgcaaaaatatatgcttttattagaacatcatagaaaatgttactggaaaattctgttatagaatgaaagaattttcttttgacttgaaatatacatattttgtttccccacttttcttttttaaagataattcttttttatcatggtgctaggctttcattacttctgccacagaataatgacaaactgacagaaatgttctaatgggaaaatgtctgtgaaaacttgtgacatattacaggcttatctccccccccccccaaataatttaagattaattgtggtagtcttttttatcatgatataaatacttggattgcagaacagtacatttcaaagttcaatgtgatattattgttcctttgtaaaacctaagtgaaaagatgctctcatatatcttgctttagaaataaatttgactagcatattaaagtgatatgcaaaaccctatcattctactttttccacctttagctaaataaagcaactgtcattttagtaaataattaattaacaaaagtcatgagaccatgtgattgattgacagcagatttgaaaggaaaacatcacaacttcctctaaaagtgctaaaaaaattttctgaactgttttgtacactgatctttctggcctctttatttttattatcatcttgtcaaacttggccattagaggctctgacagacagccatcttgagtaaagttgaagttggtcacggggacattgtgctgacgatgcttttatgctggtgcaaaagcagagttgatgaaaaataaccccatggtataatttagagttctagtggaatttgtcaacaatttaagaattgcctttctggcattgatcttcgagttaacaaactgtttctgtgctactgtttttaagagacagcagctttgtttgctcttactgcacagccatacaatggagcacttgttggcatactaatactttcacgtgtcaacttttagacagttaagttgcataatcttgggatgaaattcataaactttagatactgatgtttttagtttttaaaatgagatcatgacaaagacagacatgctaatttatctgtcaacttgatacaacctaggaccacctaggaagtcttaagacagatcagcatggagagtgggcgtgtctgacggagcttgtttggattatgaattgatgtagaaagattaaggtcattgtaagtagcagcctctgcaaaggaggtcttggacagcatataagagaaagctgaaaaaaaacaaaaaaaagcaagcaagaagccacattatgttctttttttctgcccttttcttcccacatcaatagtttgtaacctgaaaactgtgagccaaggtgagccctttctcccttaaagtgcattttgttaaagtatttctcccaacaacaaaagttaaactgagaagccaccagctttctttgtgcctctcctttcctttccttccctttcttttcctaggggatcttttggtggctgattatacaccacgaatcctttcctgtacttaggttactgttgaccaactattactcgattataatgtggggaaagagtatcagtgttttccaatgtcatcttatgggacacatttttgtatcacaagaaagctatagttaagctggtagtgagatttaaaacatctggaaagatggtatcccatatgccagatgttttttttcaacatactatggaacttcagaaaacactatggatgatattgtgaaatgctacacactttattagaaatgtcacaactcttgcactttgaccagttattcctccggagcaacccaaggtatgcttaggccaagaaaccaagctaatcagcccggtattcaaaaaattaaaaattttagaattatagtgattattgttattattttgaatgtgttggaggacacacttgtgtcatcccgtgttttttggagtcagaggacaactttcaggagttgagtctttcctctcactgtgggtttcaggacagaagacaggtcgtcaggcttacaaaacaactgtttttacccactgtattagtcagggttttctagagtaacagaactcatgggtagtctctatagagtaaaagaatttgttgatgacttacagtctgcagtcaaattcccaacaatggtcaacagcagctgtgaatggaagtccaacgatctagcagttgctcagtcccacacggcaagcaggtgaaggagagagaaaggtagacttccttcttccaatgtccttatgtaggtctccaacagaaggtgtagcccagattaaaggtgtgtgccaccacacctttaatcccagttgaccttgaactcagagatctccctgtcttaatcttttggaattcatagccactatgcctcaagatctccataccaagatcaaggtcagaaacttctatctcccagcctccagattaggatcactggtgagccctccaattctggattgtagttcattccagatatagtcaagttgacaaccaggaatagcccctacgcccactgagcctcctcactggcttaataaaaatctttaatgaatagaattggagacttttatagatagtgcctatcattatcacttcaagcttttgccatctaccaaatgatataccagcttgatgttggtttgtgagctttttatacagacttggctagtattttgctgagaacatctgaatctactcccaggaaaggaaaacaccttgtagttttcttttatcgtagtattctcactgggctatggtatcaggaaactctggcttcgtaaaatacgtttgtaattgttccttccttttgaatattttggaagtgtctgaggaatgttcagcattattcttctttaaataggtgatagaatttaccagtgaaagtcctggacttctcttcagtgagaagtgtttaaagtttgatgaggattaatcactggccagctcagccttcctattttctcatgataagttgaatgtttctaatactgcaccaattccttcagctttttccagttgttggtgaataattttcaaggcatttcatcatgatgctttgtgtttctgagttatatattgtgatgtcctttcttttatttatcatattatttgggtcctcctttctttttttaaaatctagctgaaatttgttagttttgtctttatatacagcttacagtttaatcgatttgtcctgttgcttctctcatcttgatttcagttgtttctattctaaccaggtttctctttcctaactttgtgttcagttgattttactggtttcttgaggtgtaaaggaagggtgtatgggtgacatgtctttctttcttcatcatctttttttgtgtgtgaccggccttgttatgctgctcagacagctctgaaactaattgtgtagattcttccagtcatagttcttctgccttgacttctaagtgctgggctaacaggcattggctactacatctcccgtgttttcccttccttccttccttccttccttccttccttccttccttccttccttccttccttccttccttccttccttccttccctccctccttccctcctttctctcttccttctttctttctttctttctttctttctttctttctttctttctttctttctttcttttttcttaaactctttattgattctttgtgaatctcacttcatgcacccaattccacatagaaaacatcttgtggaaactgtagctttggacctgcaggaccagctctttcacatactccagcagttcatagaaaactaatgttggagtgggccaactcaaagccctgaatctgggccacgatagttagctgagttagtcataccttcgactctcccagaccagcactaccagtgcaagctctctagcactgccctgtctggctcacccaaatgctgatacctgcaaggggcagagttgcctctcctgctctcatacccttgggggctgactcacctgcacctactccaacaaagacagcctacttgtccccacagtcaccattagggaagacattcatgggtataaaattccatcttaaaactaactttgtgtcaattcataaattgtgatgaacttcattttaatctttttaggagtggtgtgtgtgtatgtgtgtgtgtgtgtgtgtgtgtgtgtgtgtgtgttatatccaaggctttatctgctgttaggcaagttctgtacctctgagcttcttctataaccttcaaactccttatatgttttacaggagtttggtggcctactataatctattctggagaacatttgcttgagatgaatatgcattatgaagtcttataagatactgtaacattcatgtctgttaggttcacctgggttatatgatttccaaattgaatctatgtatggatcaacaatccatgctggtcacatagtactgaatatgccttctgctactgattgtattaatctgctaagttttgttaacatttgttttatatatatgagggcttctgtgtgtgtgtgtgtgtgtgtttgtatgtgtatttgtgtgtgtgcacaattattataactatttgatgaaggatgcaatgaccttgtttccctcctgtaacaaatttaaagttatttttaaaaatataagcactaccatctaccctctctttagttagtctgtatagactttttaaaaacaatcatatctaaactttcagcatatatttttcttggaaattgaagtcaactgtctttgtttttttctccctgtcttcccttgtgactagataattttcatagtgatatgctttgattcattttttctctaccttctataggcatgttctttgtgtttatcaagccttacataaaatattcataattgtaatggagtattttaaactgacaacaagtaagtcgaatcacataaaatgacacaagaattctacacttctgctgtttctgagaagcacatcttgtcgttgatttacaacttttcatgatactcattcacaaattattgtacctctgctttttataaaatcttttgtaacttagcgtttggatgacaattaaaaatttttgtacaccttcttgatggtaggagagtattccttatttgtatttggagtttttaattagatttttttcagtttaattttctttcttataaggtaggtataaaaatgatgaattctctctgcttttgcttgtctggaagattgttttctttatttatatttttgagacaaagcattttctggtggaaatactcatagtgggcaggttttttgttctcatttgtttgtttgcttgtttgagcacttctaatatacacagtcctctaacctggaaggttttggataataactctactaatttttttcaagaaggctcttttatatatggtgagctattttccttttgtaagcagcttcttcattgtattttaacttacttataaagtttaatgaacaacaaaatatgttttggtaattatccagtcaaccttagaatgaatagcatttccctgttttgttttttgttttttgtttttttttgtttttttgtttttgtttttttcagttacaagacccacagaagactgtgttttatgcattggttaaagaatgcagagacatatatttatttattatttattaatttctgtatgcagatggcttgtcagcacatatgtctgtatctcatatgtgcctttggcgtccatagagggagctggatctctcaaactggaactacagacagttgtgatgcaccttgcaggtgctgggcaatagagttgagtcctctgaaagagcagccggtcctgcttacggcttggctttctctccagacaatacatttaataggagcatagttattatttgatggtatattgacatcctgactgagacatcatgataaatgaatgaataatgaagtgtatgcctataattaatgaattatcttgtgctttctttcttggatcaactgtagaatatatgttatcaagtatatataaaactaaacaaagtcagtgcttaaggtgagatgtagaaggatgtttcataagccaaggcttgatctaaaatatgatgcctgacttaatgtaattaatcgattgttaatcccttgtttttcctacttgaaggaattttttaaattttttatttaatcttttttcttttttgttttacactacagattttattcacctcctggtccaccttccagctcttctacataccatatctcctccctgcctatctccatgagaatgtccccatccccactctacccctaccctacccctgccccactagaccactaaacaccctagggcctctagtcccttgagggttaggtgcatcttctctgacgtacccagacccagcagtcctctgctatatatgtgttggggacctcatatcagctatgtggtggtccagagatctcagggggtgcagattaattaagattgttggccttcctacagggttgccctcctcctcagtttcttccagtgtttccctaattcaacaacaggggtcagcagcttctgtccactgcttgggttcaattatctacatctgactctttcagctgattgttgagtctttcaagggggcagtcaagataggtccttttttgtgagcactccatagcctaggtaatagtatcaggctttggagcctcctctgatggatcccactttgggcctgtccctggaccttattttcctcagactccttcccatttccatcccttcaattctttcagacagaaacaatgacgggtcagagttttgactgggatggcaacccaatccctcacttgatgccctgtctttctgatggaggtgggctctacaagttccctttccccaatgtagagtatttcatctaaggtccctccctgtgagtcctgagagtctctcacctcccccaacctcctacctccggagcttgcctgttcccattctttctgctggccctcagggcttcagtccttttctcccacccaataccagaccttgctcccctcttcccctccccgtttccttttcttcccaggccctgccctccctctccccttgtttttgctctcttcagggagaagtggaactgaggcttcctcacttaggctcttcagcttgttgaccttttttaattctgtagactgtatcttgggtattctctactttcttttttctttctttcttttttttttttttttggctaatatccacttattagtgaatacataccatgcatgtccttttgggtctgaattaccccactcaggatgatatttcctagttccatccatttgcctgcaaaaatcagggtgttctcattcttaatagctgaatagaattccattgtgtaaatgaatcacattttctgtattcattcttctgttgtggggtatctgggttgtttccatctactgcctattacaaacaagcctgctatgaacatagtggaacacatgctcctgtggcatggtggggcatcttttgggtttattccttagagtggtatagctggatcctctggtaaaattatttccaattttctgagaaacagccagattgatttccagagtggttgtgccattttgcaatcccaccagcaatggaggagtgttcctctttctccacaccctctccaacatgtgctttcacgtgaggttttgatcttagccactctggttggtgtaaggtggtattcagggtcgttttgatttgcatttctctgataactaaggactttgaaattttctttaggtgcttcttaaccattcgagattcctctgctgtgaattcttggtttagttctacccccccccctttagattggattgtttggtttttcggtggttagcctcttgagttctttatatatatattttggatcttaaccctttattggatgtgaagttagtgaagatttttttccccaatctgtaggttgcagatttgtcttattgactatgtcctttgctttacagaaactttctagtttcatgaggtcccatttatcaattctgtttaggacatttccccctgtgcaaataagttcaaggatcattcccactttctcttctattagattcagtgtatctggtgtgtattgttgaggtccttgatctgcttggacttgtgttttgttcaaggtgacaaaaatatgggtctattttcatttttctacatccaggcagccagtagatcagcatcatttattgaagatgctttatttcttccactgtatatttttggcttcttagtcaatgatcaagtgtctgtaaatatatggttttatttctgggtcctcaattctattccattgattaacatgcctgtctctgtaccaatatcatgcagtttttattaatattgctctgtagtatatatagtttgaggtcagggatggagattcctccagccactcttttattgttaagaattgtttttgctattctgggtttttgcctttcccaataaatttgagaattgttctttccatgtgtttgaagattgtgttgggattttgatagggattacattgaatctttagattgcctttggtagggtggccatttttactatgttaattctgccaatccataagcatgggaagatctctccattttctgaggtcttctttgatttctttcttgaggtacttgaagttattgtcatacagatctttcacttgtttggttagagttaccccaaaatattttatattatttgtggctattgtgaaagtagttgtttccctaatttcttcctcagtctgtttatcatttgtctaaaggaaggctactgatttatttgagttaattttatatctggccactatgctgaagtagtttatcatctgtagaaagttctctggtagaatttttggggtcacttaagtatactatcatatcatctgcaaatagtgatacctctatttcttctttgccagtttgtaggctcttgatctctttttgttctcattgttctagctagcacttggagtactatattggatagatatggggagagtaggaatttcttttaaaagacaccagcaattttcttgctcctttgaatatagcttgaatatacaagcctagtccagttagttcactgagacctggagggtgtggtaagaattacataatatcaatagttataattagactatcatcatttacttgtcagaacaatagcaacttccaggaattctcaggggtaagcactatattcattaaagaaaattggaacgatgggtcagtttggaagtgtgctaagtttgaacccctagaactcacaaacaaagcatggttgcatgtgcctgtaaccccaggattagagattggagagagtagagcatcactcactgctcacctatccttaccaaacatcaagcccccagttcaatgagatacccacttcattgcagcacagtatggcagaaggcattagaggaagacaatcaatagcctgatctcatcgtctagagggactgcacagctctgcgtactctcataaccctgtgcacgcaacctgaacacatatatacagactgctaacagttgagcatgtatttttatggtcattaatatgccagaggggatccagcattatagcttttgttactattatgttctagtaaaaactctgaatgtttgtgcatccagtaatgtgtgttcctgtagtcaaatgtgctagtggtaattctcatcttcttctcaactttaacttcttattcagcagatctgagggcaaggcctattttatggtttacatttcatcttcaatatagtgaagtcgaaagctctttaagcctatagttactaatactttgtcaaagtctcatcaaatatggcgactggattgtcatcttacccctatttcaaaattttctgaaatacctcatcttgtctcagaatgtttttcacttatctataagcctaccaccttttaagagatactgtgttccatgaaggcataaattataaatatgttatcattttaaggtatgattacaaataattatggttttggatagggaggaaagaaaatagggagcatggactcagggatttctatcttggtttctttcctacttaagagaaagggggttgaaaagaaaaaggagggatatagaaatactataaaaattagacaaatagggtatattgaatctattcttaaaaacattttatagcccttatcttacattggtatataagtttgtgtattgttacaggtgtaaggttgtcattggcataaacctttgtatattgagacaaaatttaagattaaaattaaaattaatattatatttcaactcttctataggcattgtgcctatgtaactcatttaaaagtaaaagatttaatcctaattattttactagctgctattacaaactgtttaagataattaagtaatgcaagtaactaaccagtcaatcaaactcatggtcatattaaattctaatctggattatcacagaaatatacatccatgcttgaacagataatagcattctttgcttgtttggatttgctataaataggcaaatggtcttcaaaagcatcagagactcacagaatatggcatttaaggttatttcattattaaaagaacatttgacttagagtcacttctgctccagacagtatctccatcccattttaaagaagataatgagctccaatacctccaagtagagttacttttattatggcaagctagccactgggcaagaaatgccctaactttatctgcagacaaaatgctgtccaaaaaggacaaacagatgccagatagttgactgctaagctctgccaagacagtgtaagccagttcttcataattcctacctcacttaaggtctgtcagatgttttgagccaaaaggctaaagatagatactccaaagttataaggaatattgggaactgtcctggtggtaagctatctctataatttctatgatttttgaaagctgtatccctgcacttccttcatacttattccttctgagatctggttgaagactgcatgtttatagtctcacaactatgcttcagttgtctaggatttaagaagatactcttaggatggtaatacaaattaaaataagaaataatttaaatacaaaattataactcaccaagataggatagatgataaaatactttatctaaattgccaaatataatggaccaaacattaaaaatgtatatcatgtattataattttcacaatcagtataattgtgttcagtttatatctgatagaaaaggaggcttttattggactaaaaaagggacttgttgaggcttgatcttttgctatgtattgtaatgctgagtgtggcccccaatacctcattgccccagaaaggagtccacatgtagatccaaatgatgatatgtgaccttgctcccaagttatttcttatttgtaaataaagatactaacagccaatagctgtgcaggggagacatatgagacatatgcagcctttaggttaccaggctcggggtgaaagaaaagcaatgagtggaagaagaaactaaacggaggaagaagtcaccatgggatatgaatcttaatataatggccatgtgggttggctaagtggagttaaaagcaacccagatgaaacatggaaaattatataatgggattattggatggtaaatagatataataacatacacgatagatatctgctcagctcttatgctgattgaggcttattataaatataaagtttgtgaatgtcttttatttgggaactaaatatgcgtgggttcagatttcaaaggtgggttagaaaccccagattgggattaaaaatttctacaccacctgtttttagcgatgaaggcatatggcacacacagcaaagtccctttgggggaaactaagactgagatgaaaactcttcctgaatatctttgctgttgaaatctttctttcaagataaactgctcctgaaacacagttcctcatatctgacttcatgatatgactgtctttctctatcagctctacaaagtacacatcagtctgcagtctaagtagatgcagagtacaactgctttgcttagttgggtttactaactacatattttgtggatcttgttagatctgaacaatgaatacctgggaaggtaccagcttgtatggtacaggggctggataaaccaatactttttaagttcaatgaagtaaacctttctccccatggtgaactgtaggtttggagatcatggcagattcagggcaggatcaatttttactagaaggagatttttactgaggcaataattttggatttggatttgccatcagtgtcctattcaatggatgttaactaacctgaataagactttgcatttattagttcatactccttcatttgcagacagactttcaggtttcaagacatagcctaataggaggaaaatatctggaacagaactgagcttggatccttaaatctgaactcatgcatatttctgtctagctttctatttgagtgttctttcgatagggaagaactgtgtgtgtgaactctctgaatatcaagttttcattcaataaagtatcagcacattacacaatcttgttattaaaagttgacttagatgttcagtttcagagatgtggtagctttctgtgagtgctgcctccagaatgtggcattttagaggttatataggtatacttgattgtgtttggttttccttgaagttcattagtgttataactttctttattttaactcttggggcagcatttgttcagtggacatttcagagcaggggattggcatctctgataaaaagaaatctctaagagggactgaaagaaaagtatagaaacacacactacagaaaatactaaggtcgaaatatcttgggttcctctgatttcctttagtctgaatataaaggccatgaattgtatcagtgtggatatgagcatcaatcacttttgaggttcatgttacacagtccaatgtaatttttgtttttacatgttaattgttactagactggtaacttaacctacgaccttgtatatggtaaccactctaccactgacgtatactgctagcccttccaatataactttaaaaaattatcttattttttttccatttttttattaggcatttagctcatttacatttccaatgctataccaaaagtcccccataccnnnnnnnnnnnnnnnnnnnnccactcccctacccacccactccccctttttggccctggcgttcccctgtactggggcatataaagtttgcaagcccaatgggcctctctttccagtgatggccgactaggacatcttttgatacatatgcagctagagacaagagttctggggtactgcttagttcataatgttgttccacctatagggttgcagttccctttagttccaaaatattcagggaaaaaaatggaagaaataaaactgatcataaactaaactgaattgaaacaaatcatttcaatattcttattatttgtattaatttctacaaattatgtatcttaaattcatgttaaaaatttggacaatctttgaaacatctaccataactatagttagagagaggtctagatctaggcaatgtcatatttttatattaaacgtaatttgttaactcctttacttcaatgaagaattcaattataaggttctttctttatattagctccatcactgtaaatacatgtgtcctgtataatacaattttgcatacatatagaacacagtggacattatctatgatcgactacctgttccccacctactcaagaaggcagtatgtagttcaacatggagatttagaatttaaaatcaaatttatcttaagagtaccgtgttaatatactatgctaatattgcacaccagcccttaaagtttggtagagtagaatggatatcttctattatcataacaacattgccattagctttctttatataaaatgatggcatttagactcttataatcattaaagattatcttttaaaattgtttctaaactaccttatgtaggcaagtattatggtacacgtgtgtagtcccaactactaagtaggcttagagtagaggttgatgatttgagtctccaagttcaagatcatgtttcaaagaaaacaaacaagcaagcagttcatttggtgaactcaccatcactccctatgaattatttcacacttaagctatgtttcttagatacatttttttataaatagaattgaattatcagtcaaggttatagtcatattaaaaagactggggtgcactttgccactaggtgaagaaaattttgtctagggttagatgtctttgaataaattttgtataagctttgctttgtatatatctgtggttaagcagaatagtcaatttcagtatgtccaaactcaaaagtccctttgacataagctctactatgagaattttggataatttgattatagtataatttctttcttttttatttacttgataccatagcatacaagcaaaatacctgtaagattaaaaactaaaaggccaaacaaagcaagataagtaaaacatatctacaaaaacaccattgaatttgttttgttttagcgatctactgctagtctggtttatacacctggtgagactccattttacataaattctatgcaaggcaactacggatatttaacatatacagtttgatgattttgaccacatgtaaagacccatgaaacataccaacaaccaggatcataagcatgcctggagttgttaatgatttctttaagaaaaaagttttatttatttattcatttatttatttcatgtgcagggtttagcctgcatgtatgcctgcacatcaaaagagggcatcagatctcactagagatggttgtgagccaccacatgcgtactgggaatttaactcagtacctctggaagaacagctagtgctcttaaccactgagccatgtttccagccttcaacactttcttatatccctttcctggatctagaatgacagacagttgtggattgctatgtgagttatggaaactgagtctgggtcctctgcaagactagaaaatactcttagcttctgtaccaccatgtcaatcccaaattgacctttttttttttttttttttttggattcctcatataaatagaatcataaagtaattattctaattcacccataatggacatttaaactacaatggtacctttcagattcctcacttatgccacaaatttttaaagatgaaatttttaaagaggaaaggcggagtaatatttagtcacgtgtgtgtgtgtgtgtgttgctattttctatctatggatagtttatgtcactaacattgaatacagatatccctatgtccatctgtcctctctcatacattgaattaaacacagtttgaagagactgggataactggatatcagaggaggttgggaaatcaatagaatgattgacaagaaatgacaaattttgtttccactgaaaattttcaaaggatcaaccctttcaaacttcctgagcgaaggagtagatgattctgacaacccaataaaaaacacaggcctcctgtgattggttggaagacagtttcctaggcaatcaatacacagtgtgtttcatgagctaccctgggcttttcacagtatatttcatattgggatgttgattaagctctagaatttaataaaagttctatatttggatttcaattatttgtcttcacgatttatttggttttgggccaaaataaaatattaacgaataacaagtgtgctatattgttgtaagcaaaacctagtgaattgcttctttacctgagaaaacacctctaggcatcatacagaaatgactagaacaatattgaaaagcataggaatcgttcccacaacaaacacattgtttgcaatagaactgattctaagtaagatttgctttttttttttttttttgcattgtgcacctgcctgagaaattcggggtaagaattatgaaaagcatttatttaatcatcaactttttcatcctcatacatatgtcaggcagcctggggcacagtaagatgactgtaattttatttgaattcagcatctgtccatgaagcagctaagccacacttgttttccttaggagattctatctgaacaaccttttattctccatccttttttttttttttttttttttgaggtatgaataggacatgtcagactatcccatttcactcttgcctcttctaaaatctcattcttttgctcctcttaaacactgagagtatttctagcctgagcatctttagttcctttcattgacatctattcgtttccaaatgtcaagcagacattttcattttggttggctttgggtagggaaaaaaatgagagagactgcatttccccaggatcggacttcatctctctagtgtttatagcccacatgattaagaaccaacgaattgacttggaattaaaaggcaccaacacaaaaatctccaccaagctgagggattgccattttattccagagatgcaatcacccaatggcatgtcttgcttttcgtattcctcatgaaccactcattagcatgatgacctccaccaggagagcaactcactttcctttactgagccatcttcctcaggctgtacagtaatagtaacaaataacgcattcctttaagtgtttggctttttattaaaatattccataagttttgatttaaacaagtctaagaagaaatgtattcgaatgttttaattaagtcatacacgatagcttcatatatttgtaggatctggtagggatgctgctgtgaggacatagcagatccgaggctttgctatatccagctcttcatcattcttttcattttcacatagcaagtttgaaagaatataaactaaaatgttgcaactgtggggacccactctgcagattcaagctcctgcataactctaatatggtccttctaattggtctgcctaacccctaccttgtcaccgctcccatcttctggtacctgactctctgccctctgattcacttactccactaggtgtcatgcttttaaggttatctacattgcagcatgtgtcggaaggtcctcccctttaaaggttggatatttcaccacatccagatagcatgatttgtttttttgttttttttttcattcatcctccagtgtacacttggatcacttttaacatcttggcgattatgaataatatccctatgtgagcagatctacaaatgtctactctaatctctgccttcatttctttgtgtgtgtgtgtgtgtgtgtgtgtgtgtgtgtgtgtgtgcctgagggtgtacatgtgtatgtgtgctgtatgtatgtatttctctgtgtgagtatgtgtgtgtgatgtatgtttgttttcctatatgtggtcacgtacacatgtgcttgtaagcacacatacataggtgtgcttgttgaggtcagaggtcaatttcagtctcttaatcgattggtctctatcttgtttttggaactggggtttctcactgaacccagagctcactaattcagctaggttgctggccagcatcaggaatccacatgcctttgcctcactatcaccgaggaaggccaacagaatcaactaacctgtacccttggggatctcagagtctgaaccactaaccaaagaacacacacagactggatctatgcctctccacacatatgtagcagatatgaagcttggtcttcatgtggatcctcaacaactggagtggggactatcccaaaagctgttgactgaccatgtgggaatattcttatagctgggctgccttttctgatttcagtaagagaggatgtgcctaccctcaaaaagacttgatgtaccaaggtggtggtggggggagatatccggggccccacccactcagaggagaaggggaaaggggatggaagaaaggattgtgtgaggggggtgactggaagggggcattgagtggtatgtaaagtaaataaaaacaaacaaacaaaaagcaaaaaaaaaaaaaaccacaaaacaacattaaaaaaaagaagaagaagaaacccaaacaacaacaacaaattcccaattcagtgtgccttgcttttacatgcctgctaagtgtctgagttcaggttctcatgtttgtcctgaaaggactttatcaatgcagttcattttcctggctccttcacctcaattttgtgtcttcattttgtaatgaagtcaagcacattctctgtctggcagacttttcctttttctttgattctaattctatattcaagtaaaatttgatgagcagcaccaagcaatgctgccacatcagatattttcaagacccaaagagattccaaaggaattagaaatattcgtctacatttaaataaaggttagacctcatttgaagcctaagagggacaggaaatgtacaaggcagtataatattaactttcaagcaaatgaagagctagccctgtgctgatcgcatgtgctgtgtggactgtgtctatagaccacaggccaaaaaatagtaaagtaggattctaggttttcagatataaaattgaatattctaccaagctgcagtatgtctaggtttttatttggtctctcaaagatgttatctataaatttaagtactttttggagttaggcaagcaaacatatccaattgtctttgtataggatggaagggaaaagaagaaatatttttaggcatgattacaaaagcaaaattcttaaaaggtttttttaatcttacagcaattattagaaatatgagaaaagcctacaccatagatctccctctaaattatttccctttttcccttaaaattgtggcagtaaagggtttatggttatattgtggagtcctagtaactcgtaatggtctctggagataaaagcgttgtccatcacagattgcttcagtaaagaccctcttctccctcacagccattggtgaccacatagaagctttgttttagcggagcaaaaggagacatggctcagttatttatactactgtacctcccatagcaagtcctaataaaaactgatcttatattaggctaaaaaccagctcgatgagaagatttgattggctgtgcagtgggagttgattaaatcttatttgctgcatttaaaaataattgttgaacaatgacgattaatggcttgaactttatgtacaattagattttagcagtgctccaatcaatgaggggcttcttcagcagcttctcacaacaaggtactcgctgtcatttatacaaggtcaccagccaacagcttcaaccgaaacatcggctacaaatagagtattttattttattctgtctgagctctgcgtcatggactgagaaaacgtatatgagttgccagcacctcatattttaggtgtttaaagttattttaaatgtttttgatgatgaactttttctacatgtccagaaaagatctacacagcagcagaaaacaaaacaaaaaaaccaattaagtccctattgcagctgctctaattaatttcccactcatttccctggaggaatcagagagatcctctctttcccttccccagtggctctctaccaaccctgtcttttcatgcctttaggcatgaacttggagaaaattgatgtggatgatggacaatcagagcatgccttgtggagaatggctgcttgtctgctgtgtagtagcaatacataccagctaaatgtgagccctgaaatgcataatatgtaaagatgcgctggcttttacctattagtataatagaatcttagagttagtgaagattgaaaagttgtcagatgtatgattcatacaaagtcttagaggttatttgatgggcacaatgaagtaggctgcctaggttctttctgtcttctagggtcacctactccttcagtttcctttcatttttattcttctgccttctgtgtgtgtgcttgcacacttgcaggcacatgaatggatacgaacacatgactagaatgagggcataaccttgaggaaggccaagcatctcctttgagacaggatctgagtttcttctggagctcttcaactagtctttgttgattggccagtgatccccaagggtccttctctatctgtgtccacaaccctggtattatacatacatcccatccttaatttacacacacactctctctctttttccctctctctgtctcagtgtgtgtgtgtgtgtgtgtgtgtgtgtgtccagacatgtgttgtagcacccatgatgggtcagaagacagtcattgggagtcagttagttctctccttccaccatgtggatcctgggaattagattcaggacaccagctgtggtaacaatcgtctttaccattttagcatcttgcagctccctagcctttttttgtgggttctggggatcaccctcgagtcttcgtgcttgataggcaatttagctaatctcctgcacccactctcatttattctgagctcatggagacagttataagacatgtcttttaaagtttcacttattctttctttcttctttctctctatcttccaatgcttcctgttcttgtaagtaaagtccattccctacccttagccctagttcccaaacgatcctctcttcattcaatgatcctctcccaaaacattcttgtatatagaaaaatgtgataaagttgaggggaagagctctgcactgtataaccaggggatccaaacactgtgtccccgaaaaaggaagcagaggaagtgaagacctagaacagcatcctgaagtgaacacgagggtaaaggcaaggggcagaatgatgccaccaccattttcaaccttcaggcatttcagaggaacatactttaagccattgactgtgtgatagtttgcagctgtagctcatgaaaactaatgtagtgttccagtgttccagaacttctcgaaacacgtgaataaacacgtgtttgccagacattttgaagttttgcctaaacagcctagccaaaaaaccctcccatgagttacttatttgattaattaattcatcattcgtgtattgagggcttgatagatgttgaaagtgtaaccagcagaaaaattgccaggagcactgtgcataggaggatggagttacaagcagtcaaggctgaggtttcctggtggaattccaaagctgtgcatagcaggagagagaacaaggtaggatgtagaataatctttaggattgctggcagtactctggaatttgcatgtgcagtggaacaggggtcccagaggcactatataaaggagatcacttggcaaccctagttttatgtggaaaccattcctctttgctactgaagtagggtagaacttgctattgtctggtctctcgatgttgcattgcttacctgaataatttgatcccaaactccccatataaagtagttctttttctatgtatgatcatatctatatagctacattgcttggaaattggatcatagtccagttctctgtggatgactgtgaatttagttctgggtaatgagtatttttgttacttaaatttatattgaatttctatgcttgctttatattaggtgtattaaaaatagtttgcattctccacatgaatagcatactgcattgttttttcatagtggtgagggacaagaaggaaaggacagcagggtccttgagctctgctcttttctctgttagacatggatagaaaaggccagaaaagaaagatggccctccctacaccaccctgtctttctcccttctggggtgttattttcctggggttcctatctcttgctgtgttcagtgcccacctctgaggtgttgcccatctattccatgtgtaaaatgcagacagcatcttaaggttatgtgaattcccgtacagagcattccattaatactgatgatccctgtcggaagcaggcatttgttagaatttgcaagtcaggaaacgcattcaagctctctcttacagtgaaggtagctgatgaactctctattgcttgtaattcccgaatgcaaatgtcactgatcacgatgttaagcctttaattcttaaattagtctgtgatacatttatgcctatgtagttagagagcaaaattctcaaatccagcacattactcatatgtctcagggacacatgcatttttttaaatggtaaaattaaatgtatttacatagctgtttgccaagaaaatgaaaatgttttaagtaaatattcttggagctgagataagaggagctaggacatgggtggcatttgaatatttcttacttggctgtgatttcagaaacacaatactctgaagcatttataggtgcatttaccagcctcctggagtcctcacaaccaagggaaggtgccaactgctctcctgggaggctctagtgtgagtgacctgaagttcatgaaaataatattagtccagaaggtgtctgtacgactaaaaaaagaaagcaccaaaatcagaaacaaaacaactccccacccaaaaaactaaaaccaatcaaaaccaaaacaaacaacaacaaacactccgccccgcccacaaaacctcctccacctttgcccaaggaggtcagtttttcagatgaaagacatttaatcccagagccaaagagtcctggcaaatttcccacatttaaatccaatgccctgatataatgtcactgctttgtcagatgtaaaaagccagacacgatggggaagactgccacctggtggtcatataaggttactactcaagccagcttcctggttggttgtttatagctaaactttaacatatatgtcattattaacttgcattatttggctaattatgaaagcaaatgggtttctgtgtgacactcacatacatgcacaataacgcacactctctcttccctactggatcctgctccatgttcttagtacccataactcgatggtaataacctaatgtttaaggcaagtgtacaattaattaaaacttgaataccacagaggacaagtgagcaatattctattttatttacttcctaaggctaagaaacacataaaattcatttctctcgtgaagaaacttcagacaacattgttactttttcctaacttcaaagactgcaataacaacttttcacactcaaagtaatctcttatacataaggaggctaatatctctgaagttgtttttactagttgatggatatgtccacacttatttttgaactttggagaagacaggatcattgtcaatcatgtaggagtattgcttaaagcagtggtgctgggattttgtctggtcctgtgtgtgtgtgtgtgtgtgtgtctgctgtaacagtgtctgtgttctcctatatgcatcatccctgtgtcaggaaggcactgtctccttgaagtcctcattctctggctcttaacaacctttctgcctccattgtacataaaccttgagggggaagatttgatgcagatatcccatgtagggtcaagtgctccgaagtctcttccttcctgcacactgtccaactgagaatctcctcgatgatttctttctacagtaagaagaaccttctgataagggttagttctttatggatatagccatatgtcattagtagtcattttatcgctatgttgctttagcagaataatgattttcttccaggcctatgacctaactaatctcaggttttttgtgtgttttatcagagttaggtatgggctccttctaatgaaggaagtcttatatatatttttaaaaagtggatggccaccttcaaaatttttggcccagaattgtacctgtctgaagaaatgcagagacaaaaatggagcagaggctgaagaaaaggccatcaatgactggcccaacttgggatccatcccatgcataggcaccatactctgacaagattcctgatttcttgttgtgcttgcagactggagcctagcatgaatgttctctgaggggaccaggaggtggggcaacattttggaagtaaataattaaaataaaaaaagtgtttggctacacctatgtgtgatatttctgtaactattgcagtagtatgtctcccatgtcacagtgtagcttggtgtttggctacacctatgtgtgatatttatgtaactattacagtagtatgtctcccatgtcacagtgtagcttggtgtttggctacacctatgtgtgatatttatgtaactattacagtagtatgtctcccatgtcacagtgtagcttggtgtttggctacacctatgtgtgatatttatgtaactattgcagcagtatgccttgcacatcacagtgtagcttggtgtttggctacacctatgtgtgatatttatgtaactattgcagtagtatgtctcccatgtcacagtgtagcttggtgtttggctacacctatgtgtgatatttatgcaactattgcagtagtatgccttgcacatcacagtgtagcttggtgtttggctacacctatgtgtgatatttatgtaactattacagtagtatgtctcccatgtcacagtgtagcttggtgtttggctacacctatgtgtgatatttatgtaactattgcagtagtatgtctcacatgtcacagtgtagcttggtgaaattaataatcacctttcttctccagttacccgcgaagcatccttcagcatcaggagccctaatcagagtgttccagtgaggagtagagataaacaatattttaattagtaataattgctattttataatttagttcttattttgttcgattgctttacctatgttgttctactgcattaagaaaatgatggtgatgaacacctaaacatttttcttttaaacctgtgatcattacaccagtttttccttagtcatcattttctagttttcaaaaagtaagataagccgtcttgcgacaaaaagaaagggcaaaggcttattcacctcacaccacattaggaggtaaaggatatagaagccataaaatggaaaaaaaaataacatggatataggtctgcaagtgatcggttttcagacctatgcgttggtttgtttggtacttgagaatgatgtttagtccttcacatttgtgtttcacttattgtctttgcctcttttgctgcctctgtctgctgggctgatgttaattatacactatgcacttttaatgtacttaaagtctttataataccttgaagctagatcttggggtctttttgtctgtttgtttttaagatttactcatttaacatgtgtgagtacatagtagctgtcttcagacaccagaaaggacattgggtcccaggacagatggttgtgagccaccaagaggttctgggaattgaactcaggacctatggaaaaacagtcagtgttctctctagatcttgatattccttactcatgtcaataacttcttagtttgtaagcatctcttagtgttacttttgtcttctgacttattaagtctccctctctccagagtgaatgcaggagtgggttagaactattgtttcaggtgggatatatgcattgtttataatcaacttgttctttgaataatttacctttgaatttacttttccgtgtgtgtgggggtaatatgtatatatatatatatatatatatgactttaaataggtgttatttatttatacagtatagagatatagagaaatagcatgctcttttttttttttttttttactttcttgaatgagaatttcaaagctgggcagtggtggcacatgcctttaatcccagcactccggagacagaggcaggcggatttctgagttcaaggccagcctggtctacagagtgagttccaggacagccagggctacacagagaaaccctgtcttggaaaaacaaacaaacaagaaaagagaatttcagattagatataaaaggcactggatctaaacactcttccctcattaactcctttaatatgcactcagaagtacttttatatatggtgagtctggctatactgaacaatctcatctatattattgtaaatttacaacttttcccagggattctacatctatttgactggtgtatatatggggaaaacagtttcctctattctcctagattccttgtccagggggacataccgaatcgataaaaagcaaataaataggggaaaagaccatagttagttaacatatttgtgcactggaatccatgaaatatgatatcttaacaacaatgagacacattaagtttatatctggaatacagaaggaaatttggtactcaatgaagaagtgagcacacagagtcctgttatgcagataaaaggtcctggggtaataaaacaagtctcagagcaatgttcattcttctcagaagaataaatgatagtttgttctgaagctgtgtggacctcatcttttcccttgtgttcatgagttaatctttcctgggtgatgagacgatctggaaggagtctcaggaagactgacataagctctgcatatgtacaaataagagctcagaaacagcctctgcatgcactggtcattcagaagcctaaggccaaagtcactggctcagcatgtcagttatgggaactacattggtcaaacccctctactgaaatattgatttcttcaacaaggaatacagcagtttaatggctcttttgtagctgaaaatctttagaacgcattcatgctagatgacttctctagcactccttggaagtatctttgatcttttattaaataaacaaacactgttattccacatcgtaaaacaaaccatgcaaagtagcccaggactagtatcttcacccattgatgcatatgatctggaagaactagcctgacaattgtcactcagcacttagagattggtaaattccatgacagattatctctgtcttcatttcagtccagagtcactggatcacagggtctacaaggctagcttgttctttcaggagactcttaggatctgcaaatgtgagctctgaaaacaccgtgtcgtcccccccccctttttttcccaaagacttgaagttctaactgtatcacacacagctggagaagaacccactggtttgttttgaatttgcaacagggcatctgaacattacaaaatgagatagtgtcaatatattgagaatttaaaggagtttgtgtgctatctgtatttgatgggtttcctctagtgaacagtcagtattatataaaaatactcactgtgtatttatattacctacttgccacagatttctttttcattgacaggcattgctccattcagatccaatatgaagatttttttaaaactggaattttcacaaacaatattgactgacattttctctcaagatatacacacttttgaacaaatgtcatagtgtgttatttgggtctaatgtggtaggactgtagccactttggttatactattttagctggcttacatccaatcctgtatggcaaagtcattaagatgttcagctgagcattttgtttcagccactgtctcttggctttatttcttcctaatgttgaacacactaattgttttgagaaaatgtacgtacttgattggttgttcacagcctagcgctgcttagctttgcacttaaccaccttcatactttgcaatataagaatttccagtcttgtttcttttgcccatgacttgcttatatagtctttgatctgtcaccctttcttggtcttacaacagagccttacctcttggaactgggattttatgaaacacgtgctggcttgaattatgtttaaactgcattttgctttggtcaagtcttcccttgctacctttcccttcctccattttggaatgggaatgtttagtctgtgctagtgtgacaattatattttgattttatggggctcataggatttagttccaagtctcagaagagactagacaatgttgaagctattaaaggacacagggacttaggaagttggactggctgcattttggatatgagaaagacacaatcatggttagttttcattacatgtgaggacatttaaaatcacctaagataaacacctatggatatgtttagagataattctccaaaatggttcaattgggggaattattattaatattgactgtgggtggtgctagggtacaagatgaacaaaagcaaaaagaagacatgaacatgaactatttatctttctgctttctaactatagatataacgctgacccacattgtacttcaccttctgtgccttcctatcacaatggacaacatctcttcttaaagtgagagagaaaaaaaaaaaacctctcctttataagaaaaagtccagctatcttgtttacaaccttggtctctacctttttcaaaaatttccatactgtggcttcttctttgcttccagagaaatattgagtcaagtcctctaagaacacaggcaagtgtcatacaacccttgtactgatcaccaacatccaacctaggatttatgaaacattttttgaaacccagtggatgtttcattactttgtatttaagtcttgatctcatgttttaggagaaaaacattttttatatatcagttttacttaaaatagaaaaaaaataagaacacctaaaaattaaatagaattcgtgatgcgtcttcatgtactcaacccttaacttcacccactctcaggccaaagccaactttgttctagcatattctttattatacctggggtgtataaaaaataagtcaaacatatttcatttagtttcatcaataaattcttcttttaggggtaactctaaaagacaggtatatttaaaacaaacaattcaatagcataggtgaagcattagcaacattacttatcaaaatcatcaagaattatgctgggcgtggtggcacatgcctttaatcccagcactcaggaggcagaagaaggcgaatttctgagttcgaggccagcctggtctacaaagtgagttccaggacagccagggctatacagagaaaccctgtctcgaaaaacaaaacaaaacaaaacaaaacaaaacaaaacaaaacaaaacaaaattcaggtaaagacacacatttacctagctgtctcacaaaatgttttttttttgttgttgttgttgttcaaaccatgatctagattattcatatactgcaattgacttgcatcaatttatgtcttgtctttttatacttttgcttttggagagtggaacacatataccactgtgtacatggaaaggttaaagggcaatttgtgggagttgatcctctccatcatttaagttcctggggtcagagccatggttttgagtttggtgataagatacatttcccattgaaccgctggaggtcagctctggctagagactgtgaactggtactgagactgaaccatcttgctggcccctaattttatgtctttttgaatgcgtactttcttctatttttttctcagcatgttgaaagctaaaggatattttctgtagaggaggacacggcatgggttttgttgattatattcctgtggctgcaggtgaacatggtttggaatggcggtcacatagtgattcgtggcgaaatgaattaagtggtggttttttttaggatcctttgttatcccacactgaactagcatgtgttcaaagcctgacccgagggcaagcatctgcacaaagtgttctctgcctttttccctgtatatttgtcatttaatttcaaggcttgatattcagactgtttacctaggaagaatactaccagtgttgtatgtttctgtggaggttacaaatgcatgaatgcctgccttccttcctttcttcatccccacctgccattttccccccttcctcgtatttatcttcctactcccccttcttcttcctcttcctcctccttctccttttccttttccccctcctcctcttcctctccctcttcctcctcctcctcctcctttatagccgttgatcatagttatataacagtagaacagtactgttttctaggtcttgattttgtttccacatattcagtgtctttctagccagggcacataacaacatacactaccgatctcaggggattacatttattatagattcaatgaatccaatgaaataaaaattatagtctggggtttacatgaaattaaactagataaaatgaacaagtatttattttaaatcaccaaaatcaacctgtagatttaagataatagaaacattgctaagaagtgaaagacaagctccagaagaaagtgtttgaaaatagctaaggagtaccaaaataacttgttttcagagtatatatagaatttatactaatcagtaacaaaaacacagacagcttgatagagaaagtgaacaagatgctcaaatccttactatgtaaaagggtgtgctatttagattggattgtctccttcagtgtattgaaactatctagtaagtgagcacacatgtttccagagaagagtgactcaggagaaagccctcccttgaatgagtgatgcattaaatagggaccaagacatactaaaatatgaaaaaaaaatagaaaaccagtgagaacaggaattttctcttgctatatcttgtcagacaccttgtgaactatttcagtctgcaatacccttctttttacaaaaaaaaaatgtagcatcgaatgatgtgagctaattaaaccttgccctccttaagttggtgctcaggtatttgtcacagagtcaaaaagtctaagtaatgctctatgtattcagaataattacttgcggcaacccacataacactgtttaatttctacagtcagctaggaaaaacaaattaaaatcaggatgaggtaacaccagcacttcagaacctataggagttttcaatagcctgagagttgcaaatctctgaaagagtatggagacactggactttcacacactcatgagtgaggtattctaggaaaatgttgtgccagatttacaaaactggccatacatgaccaagtgaggacacactatatttattactttgctcattgatatgaaaaatcacaccagaaagcaacttaaaggatgaggagcttcttttggttctttgtctataaggatgaaatccattatggagaaaacatgactaattacccatatcttgggacatcaggaaacagaaaaagagggatgctcgtgctcagctcagtccccacctttacctcagtctggaccgcaagccatgcaacgatgccacccatattcagagtgagtttttcttcccctaatcttctatggaaaattcctcacagacttacccaaacgtgtggcattgctatgttgttgataatagaaattaaccgtcattgattcttacagaagtatgcacaagtgttcacccagaagaaaagcctaaaagaagagaaacagaaatgtttagagaagtatcatttgtaataggtaaaattagaaacaacccaaacagtcttaagtttatgtttggcacgttcagtcatggaatgtcctatgttgtagataaaaagtaagaacccaaccagaaaacagaacatacagtgtaattcaaagtgcatggagttcaaaacagtaatgaaaataaaatatgttaggacaatggtttgctttggagagaaggactgacattacactgaagcatgggggagataccagggccttaatattccatttccaggttgcggatgtggggtagtagttccataggtgaatttgatttgtattgggtcattgagccatgtttctcttactaactcattgaaagtaaataaagttataaattgtacttatatgtgaaataaagcttttttgtttcaaaaacgtaaaatagacatttttctcacatttctggtatttctttattagttacattagaaaggaaaaaagatgaatttattatgttcatcgaaatctcagccaaaatttgaaattataaacaagaatgaaaggaagctttcaaacactcttatgtgacaatgcacttcaccatattttactctattatttgatgttattctttgacaaaattcagattattataattaatgatatgtatttaaactaagcaataagaatagaaagataattgtctgtaattttccattgtttaaaattattattattaatccaaggctttgctacatttaaaatttagaaaaataatgttaactctttaaaaattggagtctttaaaaattggagttaaaatgttatatattactaggtacactattgatcactaaaaatagctaaaataatacaaagaatcaatgtagtgacatgctaggagcatttgttgttgttgttgtcctcgatttgtctgtttgaaaaactacctataaagatgtttacaaaattttgaagatctcactatacaacatctgtatccagcctagaatgacattgagtatttgataagctcaaaataaatgtaagttattatttgtatgtaaacataactcatcaagagaggatattatatatatatatattttttctaaccatttataaaagtttccaaataattaaagtgtactctaaagccgccaactaagatatcaaagaggtcttttataagcctgtgtgatgtgaacaaacactggggaagatgttgtcagtgtagcagtgtagcatctggataggcaatgagcacatcactctgcagacccagcagagcaggaaagaagagtcagaaaacagcaacaaaagggcagcattactaaagtcaggaccaagccagtgagggcttagaggaggagggtcagtgggtgtcaaaactgtaagaaaagtcgttgatttgggatgtcaggacgagaaaggcataggaaaacccataatccagggaagaggcactcattttagaaagtggggagagcactttgtgagccagaaattgggggacctttgagaaaataacaaaatgtcttttcacctcagagtaagcacgaaggaaagaaacagaaaacaaatccactcatgttagctgggagaaactatgagttgccctagggtcacttacatgaaggggaatggtgggttacttgcaggatatgggcatttgatgagctcctacaaaactgaatgcaaacgatctatttcttcatcaaaagttacaggtcagtatattgtcggggagggcagagggctcaggaaccctctctcctctagtaacaattatcaaccataaatttgacagagaggactggccttgagacagctgctgtgccacctcccccagcctctcgtcccgcatgacagaaagatatcaggctcaatcttgggcggaagtcctttgagtattactgctgacagttcaggaggccagaggatagatctacccaacagtacttgatgtgccaatgtgggttgatacccagggaggggcctcccctttctcagaggagaaagagacgggtgggggaaggggtgtgtgagggaggaactggaaggaaatttggggatgcaatctggatgtaaagtgactagttaaatgaataaataaataataaataaataaataaataaataaataaatagaaaaatgtcctattgtatctgcctatcaccatacgggtaaaaaagagagacggggaaatggaaaaaatatggtaattgattccagatcatctcaacttattaagtaattaaataggtttttaactccaagggtttctagactgctatgattatgtttggtaagagggatgggtctgacatcttttaccttacaaggaaataaaacagatccagagataagtgaggatagaattgtaaacagagacttacatcggagacaagttgtaaattgtaaaacattggagttggtgagagaaaactgagagactggcaaataatggatggaatagaagctgaggctcttgtaatcgccacaaatcagccactggcaggcagcttcagagaggcctgggaggagaagtgagatggggagacagtagataagaattgaggatggaggggaagcacagtgttagcagaagtgcgcatgagccatagagcagcagattgccatagagccaagatttcaagaatgagaaaattctaaataataaagactactttccataggtttaaaacacacaacaacagcagagacatagaacctaaagaggccacctcctgtaaccaggcaggatctccagtggaaggataaggataccaatctacccacaaaactttcgaccccaaatttgtcctgtctaaaagaaatgcatgaatggagcagagaacaaaggaatggccaaccaataactggcctgacttgaaacccatcccatgggcaagcaccaatccctgacattagtggtactctgttacacgtacacataggatcctagcaaaattgaatctgtttgtggggtagagatgttgctcggttggtagggttcctgcctagaccacaggcagtcccaggttggttcacagcacaacatgaatcaggattgtcctgcacatgtataatttcagcacctgcaggacagagtcagaaggatttggagttcaaggtcatgtgactacatatgtgacggcgtagtgaactcagtaccagactcagatgtgtgagaccttgccacaaaaataaacaagcaacaaagaaaagagctactgtgtgcaagaactagcctcaagagcagagtctatttgaagtggcagacagcagcttgctgagacctcaccttatgttggccacttaagtcattcacaagctttttaattttggcaacattttagtacaagtatgctgcttagcatttctagagtgtgaatgcttgactagagttggaatatatcatactcatcagaactgttcctagctcaaacaactaagtgacattgttttaaatggttgctactttctgttctctgctttttaaaggttcttgtgaaagggtatgttttagttctcagaaagttaaaatgtgatttttaagaaacaaattcaaaataatttcactggctccagacctattattgagcacaccacagctcccatttggcatctgctgcatggttgactctgctggacactgtttaaatgctacattcaaaactaatttcacccctaacaaatttaacctaaattcacattgtttttataccattgtagtttctgtttcttgatttctaaataagatgatttctctgttcttagccaccaattactctcccagaatccaagagttatgatttgtccattaaaacagaaactacgctagcaaacacagaagtggatgctcacagtcagctattggatggagcacagggctcccaatggaggagctagagaaagtagccaaggagctaaagggatctgcaaccctatatgtggaacaacattatgaactaaccagtaccccggagctcttgactctagctgcaaatgtatcaaaagatggcctagtcggccatcactggaaagagaggcccattggacacgcaaactgtatatgccccagtacagcgccaaaaaaatgggaatgagtggatagggaagtgggggggagggtatgggggacttttgggatagcattggaaatgtaattgaggaaaatatgtaataaaaaaattaaaaaaaaataaaacagaaactacgtgaccatagccatgcaaaccaattgctttaagatttgcagaaaagcaaaataaggaagaaggaaaaagaattgtctgtgcactaagagcaaccgcagtgtttatgacactaacatcttaagtaagctgagttggcgtctgcaagagagatgcttgccacacttgcaagaaagcagcaaacgcgtttgcaagtttttctaatacatggtgttacaagacaaatatcaccgaaggctgtagggtttctcactcatctctctaaggataacaattgtctaaattatctatcctgctatctatcctgctctcactttacaacagaaatggggttggttaagtagtgcttcagtagttatgtcatcttcagctaaactcacagatctttatagaagtaggcagaatgattgaactgttcagatttataatatgctcttgaaatgtgtctttggaaatgggtatttaaaacagccttaatgacaacttgaaaggttttatctatgagaacagggtaagatgtttattataggaggcatgataagattttccaatcgcagcggctgatgagatggctttgcttggatatagtcgcagccagtcttggaggaaggggtggcctttgaagagatgggatggaggctcttatctcttatcagggcaacataaccaagaggtacccaaatcttcattttctaaagatcaatggtttcttctttcatccaagagaaaggattggagacacggaaacccttttaaatgcctgattaaagggacagtgccaagtaaattgggttcgaggagagttcagtgtcaacatatatgcatccatggctgtttatatagcttctgaccagcagagggtcagagcccagctcatgtactcaaagcttgaggagctctgggcctgcagggttctagatgccagcacaatgtcccacctgaggaagctgtaaaccaaggctggaggaaaaggtggaaattggcttccgatgtctgatggagtaagacctgtcacatgtggcttcagtggactcccaataacaacataaagaagaaaggaattgaaagatgcaaaatgacagcttctttttttttttttaagtaaggcagctcaaatgcaccttttccccactagtatgagagaaaatatattctgtgcagagaaaggggtcagtaattctatgtgtataattatgtgaaaccttagaatattgtctgaaagagaggatgatatggatggtcagatttagattagttttcacagtttgtgttccttcttgtttaaataccttccccagaaaaatcaaattacatcagagtctcataatgcagaatgagaaacttcttgctgtgttaatccatttggtaatcgatattatttattgagctgacacccgatgaccaaggagaatacacaaataaaggtacaaggcaaaggagaaaaattactttcggcttccatattcttaattgtttttcttaatttaataatatctctggtcattaacttatttgtagtcattcagacagaaatcaaacaagaagccctcacctaagagggtaaagaaagtttacatggaggcctgcatccacttctctcaaattttgtggtcatcaggacatgaatggcaggtgtctgtctcttacagttggagtattataatgcagtctcagaactagtgttctcctaagagctagtgtttctctggaagatggtttcacttgagcatagcacaataataggatcaaagttagtaaagaaatccccaaatattaccagacatttcttcagagttaccgcttatgtttactttctgaatagaaatagtcgagatgttcatacacagtggctgtttatgaatgctgagaaggtggtttctttaagaacacatctgtttggagaggattgctcttttataagggtgctatcttctggcccctgaggatattgcatgaacatacagcctgcctacatataaataattaaaggtaagaataagtctttaaaatataaaaaagaagagcatcagaagtcatataatggtcctttagtatcaccagttaggattcttatgcctagaaattccacagaacaatttaattttgattgtgcaactatggagctaaaaaaaaaaaaaaagcctgatgcatgtcattccaaacgccaattcctctgctcttgccacacattttcattctataagtttcctctgtactccatcttcaacttgaaggttcagtatctaagcagtgacaaagagtgacacccccccatttttgtttcatctaccaggcaattttctaatatactgggttctgttttcacactcagttatagattcttgctttatctaacataactgtcattttcacttgtaatttctataggtagttgaccagtgtaatttgaatcagagatataaaggatagtatataaccatctgtccttcaatgatgcaataattagcatgcttaaaatattttaaatacatatttgatagattaaaatgaaggactggggtagagaaaaaaattcttctaatgaggagacacttagggtgttgaatgagatgttctacatatgaatgccactcagaattttgtccatagtaagatgggatggggaaatagcgatccagaattcatggtagttagagattagtaggcaaataatggaaacgagaagagatgtgttctatagctagatggtgggcatatgaaagcagcaggaagtgagagccagggaccatcaacccaaggataacctgaagacaatgaccatcatttagagtaaatgagtctccagtgcccctgtagccagtgtacgaaggtagaagctgtgttctaaaagaaagtttaatatatagtgaaatttgtgagccacgaaagaagagagaaagtcggagtaaaatgatttgttaatcatgtaaagggaaagaagagagagccaagggttaatagaaggcaagcaggcaatgaagaaataacagtgtgggaacttcatcgtggcagaaaataaatagtaatttatgatgtaggaaccagacttgtggcaccgaaactcagtagaggttgggattgggccagtgactcatgaaccacaagatcctttgagggtccatgttggagacaggacatggctatgaataaggtaaagagttagaaaaccccacacggctcatctgggggagactctgcttaggctctttcagcagatgtacattactaatttatgaaattctaatgtatttctaaaatatctaagtctacaaatgtttgcaccaagaaactcatataaaggtataattgctggcccattatgaatcaggtggctattttctcccatagtggctttatgacaaagttctctaataatatctaaaatgtcttctttagcatttggactatagcatagcataattaccacaaactgcagattttgatccacagctttatttatttgtttgtttaaatccttagaagcattagtttacttgttttgtgtgtgtctgagaggagaaggagaggaaatgctctgtgccacagagtacacgtgggggtccgagcactacttacagggttcaggtctcagcttaggtttttttgtggtttgtgaatgagtcaaataccaactagtcaaatatgagcttgtgggtgccagggatcaaactcaggtcatcaagttcctcaggcaaatgcctttatccacttagtgacccctcaactgtttaatgttatcagttgaatgtggtatgaaaaaaatccagctatttgcccattcatctagtttattgcttagtatggggaatttattatttaatttctaccttgacattaatatattttcaaaagcatgtaattcaacaatcaagaaggtatgtacatgctgaatattattcttttcaaatattgtatgatgatactagtaggcttggcaatagacattattattactgatttatatttttttggcttgtgagcaagtggaatatatgcactgtgatgataaatagttaaatttgctattcataatcaaaatgatcctttgatttatccctggcaataccactaaatagctatcctttgatattagaaggggacttgagaattatctgtgcatgcttgccactttatttttattctctcattaggtattttgaaataccatatttgacaagtccgaggctgtcatatatttgctttgtcacacaacactgtttgggatagatcttggttgaatgaaacagttattactgcacagtattacatgactaccagaaaaaaaaaagtatggcatataattgaaatcacatttaatgggttcatgaagttgtggagttgagccaacatgagttggtttacactggtctaaactggtgtatcctaagaatcctggactcctttagctgtgtcttacctcagcttagacaatttggtaacccacctaaactacagctcatggtctgcttccctcacacaagcttgaacctgtctcatcgcttaatgaaaatgcaggcatgaacaaataaacaatagtgttgttaactcttaagcctccaggtgtgtcaatatcctgttggttcaaaagaagtcatgtgggcaagccaaaagttaaaacagtagggcattttaaaattgaacacaaaggactctgataaataaaagtgcaacagatgtgtagccatcagtgtgatcattattctgtactgacagacagaaccaatgaataacagattaacataaatagggtactgatgaccaggggttatagttccaccatttgtttcattaacctgggtgaatcaggtcattttatgagactcccagtccttatatacttctagaatttcataatcctttcattctataaaaccaacattaacatgttaaattctataagtcattttatgatgaactttagagtaagctcaaaacttgcacacttagattgttaaagtatattgagaaacctaggatttataacttaatttggcatatataatatttcagaactttagagtaaagatcattgtcttgccctcagtatcaaactgactagtatgactggccaaaactgactacctaattttaactacaaatctgctaatattttacagtcatagtcaaattaataagcttctattctgaatttgataaagaaacaaagggctgaagtttaatgtcccccttaggtatttcttagatttgggatcataactgttgtatcttttgaagtatgcaatatgtcagtatactgtcaaacattataacatttcctatgtataagttacaggggcccattgatgctgggccttaataattcatcagtatgatgtattattattctcaaattggccagagaatgttgtcaaatttgcaaactgttgaataaaatgtgtataaatttagaggcgatattgagatttcttctaaataaagcatagaaacaactgtggcaagatggcttagtgggtgagaacacacgatattctcctagaaaacctgggttttattctcagcagacacatgaaatttcacaactgtacctctagttcaagggggatctaatgtcattttctagcctccttaggcaatatgcatgcaagtggtacacatacatgcatacaggcaaaacacctgtaatatacacaaaatttaaaaataataacaagttcacaaaagaataatgcagaattgatacataatgatgtgatatatgataaagtattggattgtctgactatgctgggaacaactgagtaggaatgttctacatgtaaaatattttataaactacacatggaaaaagtaatacatataaatagttttggaagataactgtctcttctataacaactttttactctactcagctggctacctcaaaacttgcacacttagattattaaaatacattgagaaacctaggatttataacttgatttggcatatagaatatttcagacatacagaaatgactttctgtgtaataaatatccttgtcatagttgtagaaggcatttatcttggactgataatttatatgtgcctgtcatttcagagtcaccatgtagacagacccaagaagcttccctcagatgaaagtggccaggattcaagagctccagttggttttcagaatgatgtggctgatgtggagagacagaagagcaagcatgggccactgcagccgcaagcaccactgtgactacatgtcagttaaactataaaatattattttaaccatctacctgataaggctacaacacacagtttcttgcttccatgatatttggaatagagcatgtgtatagaaatcagaggtttggaatcttccttgggtctacccactttttttttttaagatatatcttttttattggatatttaatttatatacacttcaaatattatcccttttcccacccccccccagagccaccctattccatacccccctcctgcttctatgagcatgtgcacctacccactcccacatacctgccctggcattcccctatactggggtatcaagacttcacaggaacaagggcctcttctctctccttggttggtggcttagaaagatatatttgtgtatgtgtgagagagagaataggtgctttgcctgtatgtatatctgtgtaccacatgcatgcagtaccctgaaagaccagaaggcaaatctccagagattgaagttacagaggctaataatcacaccggggtgctaagaagagcacctgggtcctttgtgtgcataacaatcaaatactctttaatcactgagctctctttggagctacccacctaaaattttgaggcagggtctctcactaaacctggagcttgctcatcagttcattcaagcaggctgcctacccagagatccatttgtctctgcctgctccagctctggagttacttattcatgtcactgttcttgtctttctatatgttgctagaagtttaaacctaggtccttccgaacagatacctttctaactcagccaccttcctagactaatcataatttttaaaaaatttttactaggtgaaaaagtaaaacatgcctaatagtttgaaagaggataagataactgagttttaaccggttctcagaccttttctttattcagtgggcgatagttagcatagaaacccaccatcaaagtgcagagaataagacattgatgagttctcagccgcaaatggggtatcgatatcttgtatctctccaaacccagatgttaggttagatcagagagaaacagtgtattcgggaattggctgcaccacagtgctactaaactgccagcagcagctattgcctgtataggacctgagcaagaccaagccagtattcagtttagcctggagtgggaagcagttcaacagtcctcccttctcattgaggagctttgaagaagaggaagagccagctttctttaagggtatgtctcctgttagatcaactacactccagtgtagggctccataccaaggaatatatgtatagcaaaaaatcagagtcaatgggttaataggtaagtaaaaaaataaataaataaaaggacactaggttgatcttttttgttgttttaaattttttaattggatattttctttatttacattgaaaatgttacccctttccaggctccccccaccccaaaccacctatctcatcctccctcccctgcttctatgagggtgttccctcaaccacccacccactcccgcctccctgtcctcgaattctcctacacttcactggggcatcgagccttcacaggactatgggcctctcctcccactgatgcctgacaaggctatgggtccctccatgtttactctttggttggtggtttagtccctgggagctctagtgggtttggttggttgatattattgttcttcctatggagttgcaaaccccttcagctccttcagtcctttttctaactcctccattggagaccccattggggactccatgctcagtccaatggttggtttcgagcacatgcctctgtatttgtcagactctggcagagtgtctcaggagagagctatatcaggctcctgtcagcatgcacttcttggccttcacaatagtatctgggtttggtgactgcatatgaaatggatccaaaggtgggacagtccctggatggtcattccttcagtctctgctccacagtttgtctcagtatttcctcccatgagtattttgttccccttctagaaggactgaaacacccacactttggtcttccttcttcttgagcttcatgtggtctgtgaattgtatcttgggtattccaagcatttaggctaacatccacatatcattgagtgcatatcatggttgttcttttgtgattgtgttacctcaatcaagatgacattttctagttccatccatttgcctaagaatttcattgtttttaatagctgactagtactccattgtgtaaatgtagcacattttctatatccattcttctgttgaaggacatctgggttctttccagcttctggctattatacatatgctgctatgaacatagtggagcatgtgtccttattatatgttggagaatcatttgggtatatgcctaggagtggtatagctggatcctcagatagtactatgtccaattttttgaggaacagtgagtctgattttcagagtggttgtaccagtttgcaatcccaccagcaatggaggagtgttcctctttctccacatcctcgccagcatctgctgtcacatgggtttttgatcttagccattctgattggtataaggtggaatttcagagtagttttgatttgcattaacctgatgactaaggatgttcaacatttctttaggtgcttctcagccatttgttattcctcagttgagaattatttatttagctctatcccattttttaatagggtagatttctcctttcacaaatatgaagtgtacttatttatcttttttcataacttttggttgaaagtcaattttattttatattagaatggctactccagcttatttcttgggaatatttgcttgggaaaattttcttcttgcctttttctctgaggtagtgtctgtctttttcctgtatgcagcaacatgctaggtcctgtttacatatccagtctgttagtctatgtctttttattgggggaattgagtccattgatgttaagagatattaaggaaaagtgattgttgcttcctgttattttgttgttagaggtggaattatgcttgtgtcttcttttgggtttgtagaaagtagattacattcttgctttttctagggcatagtttgcctccttgtgatgaagttttccatctattatcctttgtagggctggatttgtggaaagatgtataaatttcatcttgaaaaggaatatcttgatttctccatctatggtaattgagagctttgctgggcatagtagcttggtctttcattacagtctatatgacatctgctcaggctcttctggcttttatagtctctggtgagaagtctggtgtaattctgataggtctgcctttatatgctacttgacctttcccccttactgtttttaatattctttgttttgtgcatttggtgttttgattattatgtgacaggaggaatttcttttctggtccaaactatttggagttctgtaggcttctcgtatgttcataggcatctctttctttaggtaagggaatttttcttctattattttgttgaagataatttctagccttttaagctgggaatctttggtcttttctatacttattatccttatgtttcatcttctcattgtgttctggatttcctggatgttttgtgttaggagatttttgctttttgcattttctttaactgttgtgtcaatgttttcaatggtatcttctgcacctgtggttctcttttctatctcttgtattctgttggtgatgcttgcatctgtgtatcctgatctctttcctaggttttctatcttcagggttctctccctttgtgttttctttattgtttctttgcccatttttagatcgtggatggtcttgttcaattccttctcttgtttgattttgttttcctgaaattctttaagggatttatttgtttcctctataagggcttctacctgtttacttgtgttctcctgtattttttaagggagtttttaatgtccttcttaaagacttctatcatcatcataagaaattattttatatctgaatcctgcttttcctgtatgatggtgtattcaggacttgctttggtggaagaacaaggttctgatgatgccaaataaccttgttttctgttgcttatgttctttggcttgcctctcaccatctggttagtgctacatggcctcgatatacctgactagaccctgttcctcctgtgatcctggttttgtcagaattcctcagagtctaggtgtctctgtgatcctgttgtttctgtgatcctgtgatcctgagatgctgtgtgtgtcagagctcctgggagtcaagctgccattgggatcctgaaatcctggtctgaccaagctcctgagatcttatgatcctgagtgtgttacatggccttgggttgagcttcttctggatgttgtgggattgggtgcagagctagtgtgcaaggtcttctcagggcacaagctcagacagaaggctgatcttagaagcttcatctcaaaagccctggtggcttattaccaaacatacatgaatgaaacttctaaggatgcagtttttctttactggaatggccaccaggagcttgaccatgactatatgggtagcacaaattggactttttttcatttgtcttttgtttttgcttttcaattttttattagctattctcttatttacctttcaaatgctattccgaaagtcccctataccctccccctgtcctgctcccctacccacccactcctacttcctggccctggcgttcccctgtactggggcatataaagttttcataaccaaggggcctctcttcccaatgatggctgactaggccatcttctgctacatatgcagctagagacacgagctctggggggtactggttagttcatattgttgtcccacctatagggttgcagacaccttcaactacttcctctagctcctccattgggggctctgtgttccatccaatagatgactgtgagcatccacttctgtatttgccaggcactggcctagcctcacaagagacagctatatcagggtcctttcagcaaaatcatgctggcatatgccatagtgtctgtatttggtagctgattatgggatggatccccaagtggggcagtctctggatggtccatcctttcgtctcagctccaaactttgtctttgtaactcctcccatgggtattttgttccctattctaaggaggaatgaagtatccacacgttggtcttccttcttaattttcttgtgttttgcaaattgtatcttgtgtattctaagtttctgaactaaaattcacttatcagtgagtgcatatcaagtgagttcttttgtgattggattacctcactcaggatgatatcctccagatacatccatttgcccaagaatttcataaattcattgtttttaatagctgagtaatagcgccattgtgtaaatgtaccacattttttgtatccattcctctgttgaggggcatctgggttctttccagcctctggctattataaataaggctgctatgaacgtagtggagcatgtgttcttattaccagttggaacatcttctgggtatatgcccaggggaggtattgctggatcttcaggtagtattatgtccaattttctgaggaaatgccagactgatttccagagtggttgtataagcttgcaatcccaccaacaatggaggagtgttcctctttctccacatccttgccagcatctgctatcacctgaattactgatcttagccattctgactggtgtgaggtggaatctcagggttgttttgatttgcatttccctgatgattaaggatgttgaacatttttttcaagtgcttctcagcccttcagtattcctcatttgacaattctttgtttagctttgtacccatttttaaatggggttatttgaatttctgtagtccagcttcttgagctctttgtatatattggatattagttccctatctgatttaggattggtaaaaatcctttcccaatcttttgactttttttttttgtcttattgacagtatcttttgctttagagaagctttgcaattttatgaggtcccatttgtagaatctcgatcttgcagcacaagccattgctgttctgttcaggaatttttcccctgtgcccatatcttcgaggcttttccccacttcttcctctataaatttcagtgtctctggttttatgtggaggtctttgatccacttagacttgagctttgtagaaggagataagaatggatcaattcaccttcttctacatgataaccaccagttgtgccagcaccatttgttgaaaatgctctttttttccaatggatggttttagctccccttgtgaaatatcaagtgatcataggtgtctgggttcatttctgggtcttcaattctattccattgatcttcctgtcttttgctgtaccagtaccatgcagtttttatcacagttgctctgtaatacagcttgaggtcaggcatggagattccatcagaagtaatttttattgttgagaatagtttttgctattttctgctatcctaggttttttgttattccagatgaatttgcaaattgccctttcaaactcagtgaagaattgagttggaattttgtcttttgtttttactttctttattctttttcaccttctcctttattttagggtgtgggggagttctcaatggcagcaacagacctgggaagactaggaagtgagtgtacttggggttcctgatgtgaaattcctgagtaatcaataaaaatattattacaaattaataaaatattcaaaatataagctaatcaaatgcatacttcatttacgatggctgttagagatggtggtatggcattttctgtctctgctaaagaagagcaaatggccttgtgaaggactgacagcactcaattaagctacaagtctaacttccatatggcaggaatctgacatgccttgacaagggaaatcagaatttttgtctttttttggcaatattttagatacaccaaaccagctcaattcctatgacacttatcttcacaacttcacatttagtttgcaggaaaaatgaaattaattattcttaagcatatggtttgttcctttcccccacccctccttatttgattttgtagtgaatacatttttttctccaaggacatataaaagtcaaaatactagatctaaagtctctgaagtgtttctgctccaaaccgtgtctgtacagtctgagttctttcaagtagttagcttactggcttctgacacttctataaaaatatcccatagagcttttcttattacgttttcattgactctctccgagtgataaaatgaaattctgtaaagggctttgaaaaccatgcatattgctattcctccacatttcaaatactaatcaagtgtgactataaaagaaacaactggtgcagtgaaaattgctgcagcgggttgagactcaagccattattaattcattggaaactatttttttctgtaagattatggatcctacaaagtaccagataacacaattcctgagatcaaagtttttgtttcaatcacagggaacttgggtatctaatcttcccagcatgtgcatttctgggatagtacatcagctgctccagctgtgccctgagtgaataatgcagcatattttatagactttggaagtacctcttcttacacagtgcccataaatgatgggtttaaggacaaaaggagcctcagattaaaacaacaggtctagactagagagacatcctagcttcctacaaaagagtaaagtaaaatttcccttcctaggctaattcagcatgtatttgcctgaaaactacaaactagtagtgtgtgcagagtatttttatttgctttcccaccttcaagacaatcaggttggaatctgcagtctgagctatcactgtgtgacagttccatccatagaaataaggaggaaagtagaggccaaataaaactttgtcaactctgattttattcacacacacacacacacacacacacacacatggtatacatattatctatagtaaaatatatacctttatttaaaaataaactgatggattggactcacacttaccatgctaggtagggattgcttctatgtaagcactaacgctttcagagtgcaggaggagcaagcaagaccttttctaaactgcatttcccaccctgtacttctttccttgagacagggccttgctatgagatccaggctgactttaaacttatggtctttttgtcttaccactgcaagtcctagaactataaatatgtactatcccagtgactttccccccaaatgcttagatattagttaatgactctcctcctctttggtgaaagtagttgttgttgaattcagactaaaaattctaaattataaagtctcattaggacaaaagtgctagttgtttttttaatcttgtgtctctgggtacccagtcttgctcatcaggtgcaagagatggaaccttactgaagaaagattactgaactaaatagtcagtgtagataattagattttgttaagtggccaaacaggaactatgcaacagcagtggaatcgactacagtcagattcagagaaacgaactctggacagtattgtcagggccaattcctttctctaagaagccagcaaaagagcttcactgacctcttaggtgaccttctgtgggcccttaatttactctaatagcttggtgagtctcacctcatcttttagcaacatcctcattaactctgcatgttttgtctataaataagagtacagttctccgaatgcactgtgtgtggtatgagggtaaagttcagacctctgcagtcttagtggtgtctgttagatttaaactctccactcactcacagtgtgccattggcaatttgttaaactcttcctatttgttaaattgggtccatgtttggtactagtctataggctactttgaagagttcattggataaagcaggtgaaagttaatttaaccgtaacaaactccaattttttttcagtgctgcaaaaaactgctgactctgagttcatttcaaagaacacattatttcatgacaatacctctaagaagtcttgatattgtgggttattgaggcttagtctgcatttttttccaatgggaattctgtcctctggcgatttttatagctatggacagggagttcctgagttcaaagaagcattgctatgatagaattagctgatgatctgaccctgctgatttttactgtttaaccagttctagaaatgtttgcattaagcaggctttttgtttgtttgttttagttttagttttgtttgttttcagtttgtttgtttgtttacacaccagctccctagattgaattgcacatggcaagctgactgggaagtgctctcagggaaaataccaaaagtgaagaaacagaaacaggataggcagagggagaagagaagtcccgatataatcgccaaaaagacttcaggggaagcctcatggaatcctgtgatgggcatggctctttgaaggtgccctgagttggagcagtcttttagcatcatggatatagctgtcctggccagggactgtgactgtggatcaggaggcttcatttggcccagagcaaaatcattcgggataataggattactatttacttgggagggagactgtgttagtatgtgtgttactcattcgttcttgctaggattgtttctcgtgacttgtctaggtgcacagggatctgtttttctctttctgacttatgtgcccctctggaagctgaaatcttttcagaatgcataaatgttctttattaaatataccttatattttcttgattcatagtccctaatacaatttctttctttttaactcctcagtcatgctccttaaattatccttaatctttaaatgaaacctgccattactcatccttcataaattagactcctgaatcagtaagagaaacaggaagcagaaaataaaacatggtgccttgctttctaatctcagccctgctccaaacctaaaggtacagcgtttgcacaagctgtttcatctctctaatttttttt

SEQ ID NO: 833 - DNA, 2378 bp, Mus musculus
cgcagggagaacaaaaagagctttacccactgtctcctgcctattctcaagttcttccgctgcttgagctgtttgccctgggcttggctttcctgtgacctccctgcaccaggtagaaactgaagaccagctactgcagacaagtacctccccaccttagggctgtcctaccccgattggctcccatttcacattctgcctgtgtgggcaattatgagcaaagacagaacggtagacaattgacatctagaaaccacaaggtcttgtaaaagatcaggtctatataccaccgaagacacaacaatggctttatctctggaagaatttgtctactcccttgacctgaggaccctccccagggtcctagaaatccagtcaggcatctactttgaagggtctgtttatgagatgtttggcaatgaatgctgtctgtcaacaggagaagtgattaaaatcaccggtctcaaaattaagaagatgatggctgaaatttgtgagggcgctattggaggttgtgagtctcagaagccttttgagctgcccatgaattttccaggtctctttaaggtcatggctgataaaactccatacctgtcaattgaagaaatcacaagaaccgttaatattggacccagcagactaggtcatccttgcttttatcacctgaaggatataaaactagagaatctcattattaagcagggtgagccaatccggttcaactcagttgaagagattaatggagaaacgctggtgaattgtggtgtggtaaggaatcatcagagccactcatttactttgccattgtcacaagaaggagaattttatgagtgtgaggatgaacatatctataccctaaaagaaattgttgaatggaagattcccaagaacagaacacggacagtgaaacttacagatttctcgaataagtgggactcaaccaatccattcccagaagacttttatggtacactgattctcaaacctgtttatgaaatccaaggtgtgctgaaatttcaaaaggacatagtccggattctcccaagtttagacgttgaagtcaaagatattactgattcttatgatgctaactggtttcttcagttgctgtctacggacgacctttttgaaatgaccagcaaagagtttcctgtagtagctgaagttgtcgaaatatctcaagggaaccacctgccccaaagtattttgcagcgagagaaaaccattgtcatccacaaaaagtaccaggcttcgaggatcttagcttcagaaattcgcagcaatttccctaaaagacacttcttgatccctattagctacaaaggcaagttcaaaagaagaccacgggagttccccacggcctatgacctgcagatagctaagagcaggaaagaaactctccacgtggtggccaccaaagctttccatacacttcacaaggagctgtcccctgtgtctgttggagaccagtttctagtgcatcattcagagaccacagaagttgtctttgaggggacaagaaaagtaaacgttctgacctgtgaaaaagtcctcaataagacccgtgaagatgcacagcttcctctatacatggaaggaggttttgtagaggtgattcatgataagaaacagtatcagatttccgagctctgtacccagttttgctggcccttcaatgtgaaggtggctgtgagagatctctccattaaagatgacattttggcagctaccccaggacttcagttagaggaggacatcacagattcttatctacttatcagtgactttgcaaatcctgaggaatgttgggaaattcccatgagccgcttgaatatgactgttcgactagttaatggtagcagtttgcctgcagatgcagggctacttcaagtcaggagttttgtagaagagattacagaagaacagtattacatgatgaggaggtacgaaagttctctatcacatcccccacctcgccctcccaaacatccctcagctgaggaaatgaagctcaccttgctcagcttagcagaagagagaacaataaatctgcccaagtctctcaagagtcaccatgtagacagacccaagaagcttccctcagatgaaagtggccaggattcaagagctccagttggttttcagaatgatgtggctgatgtggagagacagaagagcaagcatgggccactgcagccgcaagcaccactgtgactacatgtcagttaaactataaaatattattttaaccatctacctgataaggctacaacacacagtttcttgcttccatgatatttggaatagagcatgtgtatagaaatcagaggtttggaatcttccttgggtctacccactttttttttttaagatatatc

SEQ ID NO: 834 - protein, 654 aa, Mus musculus
HLETTRSCKRSGTTEDTTMALSLEEFVYSLDLRTLPRVLEIQSGIYFEGSVYEMFGNECCLSTGEVIKITGLKIKKMMAEICEGAIGGCESQKPFELPMNFPGLFKVMADKTPYLSIEEITRTVNIGPSRLGHPCFYHLKDIKLENLIIKQGEPIRFNSVEEINGETLVNCGVVRNHQSHSFTLPLSQEGEFYECEDEHIYTLKEIVEWKIPKNRTRTVKLTDFSNKWDSTNPFPEDFYGTLILKPVYEIQGVLKFQKDIVRILPSLDVEVKDITDSYDANWFLQLLSTDDLFEMTSKEFPVVAEVVEISQGNHLPQSILQREKTIVIHKKYQASRILASEIRSNFPKRHFLIPISYKGKFKRRPREFPTAYDLQIAKSRKETLHVVATKAFHTLHKELSPVSVGDQFLVHHSETTEVVFEGTRKVNVLTCEKVLNKTREDAQLPLYMEGGFVEVIHDKKQYQISELCTQFCWPFNVKVAVRDLSIKDDILAATPGLQLEEDITDSYLLISDFANPEECWEIPMSRLNMTVRLVNGSSLPADAGLLQVRSFVEEITEEQYYMMRRYESSLSHPPPRPPKHPSAEEMKLTLLSLAEERTINLPKSLKSHHVDRPKKLPSDESGQDSRAPVGFQNDVADVERQKSKHGPLQPQAPL

SEQ ID NO: 835 - DNA, 108057 bp, Homo sapiens
aatgtctgagaaactaccacagctcccaggagcctagggagacataatggccaaaggcaatggggtatcctgaatgggatcctaaaaaggaaaaatgacgttagcaaaatctaataaaattttagtgaagtatgaagtttagctaataataataatatctcaatattggcttctacattgtgacaaatgcaccatcataatgtaaagtgttaaaataaaggaaacaggtgtttgtatgggtatacaggaaatctctgtactatctctgcaacttttctatgattctataacctattctcaaataattattttaaaaaattatggttgctgtattttataaactccatttcaaatgtacagtcatctaattatcttccctaaggcatggtgatagtagaaacagattctccatttcctggctctattcagagagctttattctggaaataacgttgtgggaatggataaaaatattcaattacttttgaatacttgctatcagaaaacaatacttacgtaatgagattgtaactgtttatagcaagaattttcttccctaataacaaattcttaaagataaatatgtaattcctaagaatgaaataaatacatcttctaagacaatgagcttacaaaatgatgaggcttgttgcaatgctctcagagtttaattggaaaaaagagacactgagaaggtagtctgaactatgactgtaattctttataaaaaaacatcatctataacaagccttttacttagtcttagctagtttatatatttaaaaaggaaattagatgcactagaaaataatgaaagctaaagctattatttttctataaagtgaatctataaatctcttctgttgctaccttttcaatccctttgagatttttttttactgagagtttctcaagagattaaattttgtgggtaagtgtaatagttcctgcccaggtttttctgttactggatctatgacttttccaactttgaaaattatctcaggcaaattgtgtatcattatcttagtttgtaaaataggagtacttttgagaaacaaaatgtcctcaaccatgtattgctgatgtatcaagtgaacaaagtaggttcttcaggtttttaaaacactgtggaaataagaatcctgaccaacctgcacccatcaccattctcctttgtgtgtgtatagttgttgttttatgtttatgtgtttgtttttgttgccatctctattacttttcccagtaattcatttgactgggactgttaaatatactgttaatattacaaagctttggttaccaagtgtattagtctgttctcatgctgctataaggatacccaggactagctaatttataaaggaaagaggtttaattgattcacagttccacagggctggggaagcctcaggaaacttacaatcatggtggaaggcaaagcaaacatgtccttcttcacatggcagtatgaaggagaatgagtgccaagtgaagggggaagctccttataaaaccatcagatctcgtgagaactcactcactatcatgagaacaggatgatgaaactgcccccatgattcaactgtctctacctggtcccactcttgacatgtgggtattattacaattcaaggtgagtcttaggtggggacacagaatcaaaccatatcaccgagtaacttccccgactcagtctagtggcaccaggtgaaaaaaagttatttgtaactcacagtttcatgtatacatttgtcaggttaagcaaatggtctgttgcccaataaactaacttgggttaaataaatacatatcctaagttgaatttactaaactagataatttgtatttaatgcatattttaatattttatttttgtaatatatatacttaatatattatttaatttttaggtctgaaatctaaaaggaaagttgattttttgtaagcaattggcaacttatcagtgcttaatttgtaatagataactattttaaatgttttaagctctacttttaataatacaggactgaattgtttctgtgaggctctaaaatgttagcacatcaaaacgcaaatggcatctttgagtttctctcagttataagagataacaaatgtgaaaaaaaaagagaaaagagaaaagagctgttaaagtgggcataccctttctacagacatattgcagttaagcttttcacaaatgctatataaaagtcagaggaaaatgttagagttacatcacaggacctccaccatttaaagggaagaactggaaaatctcttatgaatataagggcttcattttttatttcatggttctgaggaaaggttgagtcctacagcaagggaaaatgtcagggcataattcatacggtaacaccaacattcacattgcactttgcaagacatttcaacctgtgctcctgttctgtggcaccgagcagtaggcagaactgcgtgtaaaaaaatacgcagatcgactcagttgagtcaagtctcctcatggtgagcaggctcatctacttgactgctttttaccctttaagattaatctgaggaacactcttcctggggagaccccttcctaattcttgaagttcctgaactgtatacattggattgtgattcttaacttgtgggcatggtcagctaaaatgtaatgtctctaagggcttatattctcagtgccttgtataatgacaagcatagaggaagagttcagtggtttgctgaaaggacaattaaacattaatttagaaaaaaggatgatcaaaaaagaaacttacatgggaagaaacatgaatcctacattgagttttattcaaaaggaaactaaaagtgccgggaggcaggagcttctttgaaaaccaggtggtgatgaatgaacacattcataggcggttgcattttgcatgttgcattttgacaaaacaaattgttgtgtatagtaggattttattttctttcaaggttattaaaataattcatattcattcttataaattaagaatgaaaccccgtctttactaaaaatataaaaaattagctgggtgctgcaacagagcaagattccatctcaaaaaaataaaataaaataaaaagaagaatgtacatatggttggagacagaagagaatggtgatcaaggtatttcaaatggaagccatttatggcactgggaacatttttggtgggtgtactatgattttgtttatcacatacccattccttctcttttgggtaattagctcacttatttccctttgatatatctcctcttccaacactttttgtgatttagctgagacaactgcctaataaaatccaaagtagagcccgtgaacctgaaattatgggaaattagcatatttcattttctagtcataatgattggctgagacatatacatgtgagccaagtttgatcaatcacagtttatcctgggacttttccaggtataactaggagaaggtagtctcttccattgcacttgaatctatgagatacaaatcttgagctgccaggtgtcacacaacagcaggatatccctgaaatgtcgctcatgcaaaaaaaaaaaaaaaaaaaaaaaaaaaaatccgagcctaatgccctaatggtattgtatgattccccagagcaagcttattttgtaggtagaaatgctgtaaacctttcaatgacgaaccaataaatggcaccttttggttaatccaaaatcacaggagtgattcctataagcctaattttttcttctttagaaataaccaatgaaaagaaagtttcagagaatgaacgatttagataccagtcagaataatctctaagatttcttcgtttttgtttttttccgatactatctacttggagataagggtttattctttactcaaagaaatattacattgcactgaaatattataatatagttttaagcctctactgctgaagcttatttctctgcttgtgaatttttttttttgttttttaacattcagacagttctacttactttttaggaaagcagctatagagaatctaacaaacgaattggtattttacgtaaagtttgctttgagccatttttcttttctttttcttttcaacaatacttctcttgggatagaaatcattggcaataatgatactaactataatttaatcatcatttcatagccaagtccatctctgttctttagcagaaattttaaaaagatgtgttaagtagtagcaagactggtgtgaggacaatattttttttccaacaggaacttccctgtttgaattattagggtaatgtgaaatgcattttcttttcttttctcctcctttttttggtcattaaagtaataaatgcttcagttgatggtataaataaatctttgtgtgtatctgattatatctaaatgtgaaattgctacatcaaattgatttcaagatagatcacaacagtttgtaatatagatgagtgactaaacattgcaccattaacagtatgaattttatgaaataaatatttgctttttctgtcaggttggtttttactctgattccattcatttggtcaattttgctttagatattttgaaggtatattattgaaagctgtgaattttctttaagaattggtcaccctttcattattaaacaaataaccttattatcttttataatccttcttgtctttaaatctaattgatgtaatattgatgtagtttcatgagctttcttttgcttaatgtcttatggtatttattttcccattttttcatctttagactttctataaacttataactaaattgtatatttttaagtagatttatgtgtttaaatgttatctgccaacattagtttattacttgaactattaaactatttaatttttatttgtaaaaattatttcatttaaattatttaatttaaattacatttaaattatttcatttaattacatttaaattatttcatttaaatgtaattatttcatttaaattattttaagagtataattgagtttatgtataccatcataatgtttgctagcaattttgaggttctttttcttttctttctcgtcttttttggattaattaattttatcatcatttaccatttttagtggctttcctagaaattacatgtgtttttatttatttaactctgatattaaacatcacttttgcaacttctctagaaggctaatgctttagaacattttaacttcattatcagttttgcttttgcattactgctatattttacaatatattgcatgaactatatatagtgcagatatattcaaaactccacaagccattaattattgttttgggaactcaatatattcagttcactgacatattcaccctcttcattccttcctgtggtcttgactttctgtctgagatcattttactttcgcctgcagaacaccctttatagtatttcttttagtgagagtttactggtgatgaattttcttagtttttgtttgtctgaaaatgtctttattttgctgttgctttcatgcgtctctggatttagaatatcaagttggtagttggtttctttcagcattttaatgatggtattccattgtgttctacccttattggtttttgttagtaagtcagctatcatcttattggtgatcctttgaaagtgacaatttcttttcttcagagtgcatttaagatattctctttgactttggctttttaacgttttagtatgatgttccttagtgtgccttcttttgcatttatcctccttggtggtgttggcaaggcttgaatctatggattgatgcctttttcaactttggaaaatcttcagctattatctcttaaaatatttcttctcccactattatttctcctctcacgttgggactcagtttacatataagatctttccactatggctgaaatatctctctgcagagacacagagatagatagatagagagagagagagtgagagagaaagagagagagcagatatttcctacgctcccatttccagttcaacaatcctctcttactgtatgtcccatttgctgttaaaaccaattattgaatttttaatttcagttactgtattttttaactctagaattttcatccgatactttctatagatggcagttcttttctccttcttgtcttctagttttgaacatgtttatcaaaattatcttaaattgcaggactaataattccaatatcggaattaccccatgagtttgtttctgtggtctcccttctctctgtctttctctgtcctgtcttctggcattcccattcatttcatacttaattatagatgttgtatttttaaatattacagaagttctggctgcttttcctcaacaggaggatttacatttgcttctatctggcagcaagaataggggcagaccactttaatccaatgagggattgagctaattttagtctaagcttcagtttttgtaaagctagttctatttataggcaaccctttctcttaggaagcagccttcaggagccccaactgagaacacaggcatttgttgtgactcctgctccctccttggctggccctggcttcccagttctgcaagactgctgaaagcactccttggcttcttcagcttcctaccaaccatgctcttgtttgtgtctcatacaatcaaccctgtactgctttcaatgagcaaaaaaattttaaggggaaaaagtggtgctgagcaatacctttctctgacttttcctggaggaattgctacttcccaaagtccaatttattttggtctcttttgctatgtgaaactgccaaaaactcaactcaggttctctcctcctgagccaccagtttttgccttctcagactctctcttggtgccagttactaacccataaaagccttgagggaaaagaagtgcagaatatggagttcctctaatggttctgctctgctttacaggatcttggcctctcatgttctgcaccctgacagctctcttgtttcttaaaacagcttttttaaaaagtatacagctcttctaggtgcctttggtagaaaacgtggtcagatacaagctcatagccagaaatagaagtctttgaatatttttattttgcatattgactaacaagtggcctttacccacctaagccattgtttatttgaaggatgtgcttttttttttttctattttgttcaaactcctttttgatttacaggagtatttcataagttagttgtcaaatatattattagttttttccttcaattactactcagaaatagttattttcttacccttttccagacattttcctatttttcccctctggtttatttttatttaaatttaattttaaaatgtatctaactttaatttcattgcatggaaagttagggaaattttctccccaattatttaacaaccatttgttgaataaaacattctttcccactgccttggaatttcacctttttcaaatagtaaattattatatacagtctagttttttttttaaaattctcgttaatctattattacacctataacatgctgttctaatgaccaaacttcaataattcattttacttgatgattcaagtactcttgaactcattgctcttctttgtcaaccttaacttggctgctcacatcaggatttttttgcctgtgtgtcagaagtgattacgatctggtctaaagcagtagcagtggggatatagagcaaagacagagtgagtggtactgagtattgccatctatagggcctgatggatttaacggctagagaaaaaaaatggcatctcacatgattctaagccttccggcttgggaaactaagagaatagcagtgtcattaattaagactgagaatacgaagatgattatcacagagagagcgtcatctgtcgcgagagcagaagcagatggagcctaggtaattgtaagagattggtgatacgaaatggctgtttggctagtaggatagaaatttgacttgggaatattaaaaaaataagtgatatccagcttgcattagatatcaaatgaaatgtattgtggcatcagttctaacggattcataatttttaaggagcagtccacagaagcctctttcatgtattcatccacatgaaatacactactaggctgtaaactgtggggaggggtatggaaggcagacagatcaagggtaggacatttttggacaaaaaagttgccagtgaggaatttgaatctaatgatagtaaacctgttgatgtggtcaatcgtaaattctacttttataaagaaagaaatgaagctggactgattattgaaaatgtcaaataggattacaaagagttgaaacagttttataagctccatatcaaaactaggcagtttttatctttctaggtcatttacatgatggccatggtagaactgagatgtcccctgaccctctgtatgtggctatgctctctgcagcctaaggccaaaacagttaatagataagtgcctgggtttggttactaaagaaaacgtgtagattcctgtcatctttcaagtgtatacataccaaccagtattctttattttttttttttttttttttttgagacagagtcttgctgtgtcattcagcctggaatgcagtggcatgttcacaactcactgtagcctcaaactccagggctcaagtgatcctccttcctcagcctcctcacagctgggactacaggcatgtgccaccatgcctggctaattttttaatttttttgtagagacaaagtctcactatgttgcccaggctggttttgaattcttgggctcaagcaattctcctacctcagcctcctaaagtgctgggactacaggtatgagccaccgtacccagcctcaaccaatattcttctactttaccttaaagagacttaggaactaccacctttaattgtatatattttaaatattgtttcagttacatgcaaaaaatagagaggggcaggattttgaagagatcaatgttcatgagttttctcctgcttcctttggtgctgatcatttcccctcctaaatttcaacaataagatcagaattgtggaattgtgaacttggaagaaattataaaatttattggactcttctacttcatctccatttagtaaataaaacaaatgaaaatcagagaagacaaggctgacgttagcctgtaaatcaaaagcagaactaaacccagaaaatgcaggtttcctgacaagtaattttaatactttctactatagtgtagagattagaaaactcattttaatgtactttgttaatttactgtatcattttgcatattctatccctaccctaccctcctttaagattcagcaaaatttttaatgtggaagaataaaaagtggtttcaatactctctccagagtatagtatcagaattctaaaaagagctgacgcaaagcacttttattaccaattttaatgtaaaggcactgacagtatgcaaataaggcacaaagccaagctttagaaatgaactagagagataatgaattcacatggtgccatttttaagattagactttagtcctatattcctgttctttgttggtgggcaagccacaagcaactctgacctcagttttgctaccatagtagatgcacacctggattaacaaaggacagaatgcgctacttagcacgtctcattttttgggcagtgtctgttcaccccacccccatcctgttcaacttcaatgtcagaaggaaatgaagccacaatgtgaacaaaaagagctataacattttttgtctcctgcttcccccctccctcttcattgtcctccccacatagagctactccaccccactctggctgtagtgtgacattcctgcctgcctgaggaagaaatggtgagcaggggctgcaattgcagacaagtgtcacccagaagccacaagtttctgtgagcaccaggtctacaaactacccaaggcatagcaatggcattatcactggaagaattcgtccactcccttgacctcaggaccctacccagggttctagaaatccaggcaggcatctatcttgaaggtaagcactctccaatacctttactggctagaacattcttgtaaagtatacatttttgaaaattggagggggggaattttaacagcaaatatgtgagttctggtaaaggaaaggcgatcacaaaagaaagtaatgaactgaccaacgaatcgtcaaaagccaatggtgttggagaggggagaaactagacaggactctgggacagacagaaataaggaattgagtgaagcttcttgagctttctgtaggccttgaatggtgaactatttctgcctttgctttgaaattggttgtaatcaagaataataaatttagttatcaatatttatgtttccacaatataaaaaataaaatttagcttgctaaaacaaaagcaactatcaaaggcacagtgtttagaaagaagtatttccaaatatttcccaaacttttagctcctaaatgttgcttataccaatgtttttctcactctgtagtggcctaactccaaattccttaaataatgaaaattttaatttgaaggtatagaaattattgctacaagataatttttaaaaattgatgttgaaactcagagttcaattaaacttattgaataataagatagtgagttttggtgtaactcactatgttaattcaggtgaaagaacattataacctccaatatacaacctagaatctttacatggttagtttgaatacatagaatacaattaataattctgtaggtgtatttctggcctcaagagtggtagaattgaagcagttgtagaaacagatcaagacaaaactaccaggaaaataacttaactgttggtaggcaggtctttcttgttcgtagacaaaataatgtattacatattatgttgcaaagtaaaagaaagattaacacgtcagctccagtttttatatatattatatatatatatatataaaatatacacacacatacttgcaggtgatgaattgatatgggctgttatcagcttagtgtacagttttatttaactaatttgtaagttgatttttggaatcagactatgttttgccgtgtataatcatattatcaatgtctctatttctaagccagccccaaatcattttttgtctcatggtttgtgttttttaggctttacgtaaaaagtctttctttatgtctactttaaaaagatattttcctatgttgtttttatcaactttacggtttcatattttgcatttagtttttagtctatttggaggacaatgttatgaattgtacagggatccaattttagttttctctatacagttcacctgatttccaggtaccatttgctaagctgacaatctttccgccattgatttttgttgcctccttcaaatcatattatatgttcacctctgtatcagtctgtctctaaaatatctcttctattccattagtttattttttttcttagctgcccccaaacacactatttttgtaactatggccttgcaatacatgttaatatagaaatgatgtatagaccaatcccttgttttcaatccttttttcctaaattggcttagatattcatagactttaaaaatgtttttatagatacataatatatatacatatttatgggatacatgtgatattttgatacagtgtgtaataatcaagtcagagtaatggggatattattcattgcctcaaacttttaccatttcttcatgttaggaacattccaattccactactctagttgttttgaaatatacagtaaattatttttagctatagtcaccctattgtactaccaaacactagatcttattccttttaactgtgtttctgtacccattaatcaaccaacccctctctatccccctcccactacccttcccagcacctggtagccatcattctactctctatctccatgatatcaatttttttagctcccacaaattaatgagaacatgtgatatttgtctttctgtgcctggcttatttcacttaacctaatgtccttcagttctatccatgttgttgcaaatgacaggatttcattcttttttatggctgaataatattccacattttatttgtctattcatctgttgatggacatttaagttgatttcatattttggctattgtaaaaacatgtgaatgcaggtatctgtaatatattgatatcttttcttttgaatatatatccagcagtgggattactaggttgtaagtagttctatttttgtgtgtgtgtgtgtgtgaaaacttcacactgtttctcatagtgactgtactgatacacattcccatcgagtataaacgttcccttttctccacatcctctcaaacatccattattttttatctttttgataaaagctattttaactgaagtgagataatatctcataactttttcaatgagtttttattaaatcaattgattctataagaaatctaactgggatttttattggatttattgatttggtagattaagttggaaagaattgacattctatattgttttaagaaagaatgtagtatgtccctctatgtgtccagaccatcttcttcataccttattattttactactatgttttacttcaattaagagggaaaaaactaaataccttgatcattttcacagtgtaaacacattcatgtaactgccaccctggtccagaaatagaaaattccaagtattccagaagccctatcctgtgctctttctcagtcattatatactatctccctcaagtgtaaccactatcatgacttttgtccatttatgacccttacataaatggaaaattacagtatgtattcttttctggttggtatatctgtttaacattatatttgtgaaactaatccatgctgttttatatatagttcattcattttcagtgtatgttattccattagatgaatatactacaatttatgtattaattctactgccaataggcatttggattatttctggcttggagtttccagtaattttgtcatgaaaattcttgtacatgtgtgcctacgtgtatatgcattaagtagggcataaaagtaagtaggattactatgtcatattgtgtgtgtacattcacccttggaagctaatgaaaagcaagtttcttaagtaacccaatttactttcctacaagcagtatatttgtgttccaattaactcatatgcttagtaacacgatattatcagtcttcttaattttagtcattctggcaagagtatagtggtagctcatggttttagttttcatctccttgatgactaataagattgagcaccttttcatatatttcttggatttttggaaatactcttttttgcagaggtggtttatatttcttgctcatttttctgttgaattttatacatttttgttattgatttgatggagtttatgtgtatatatatatttgggatatttactctttgtcaattttctgtgttgcaaattactttcttagtctatagtttcatattttattttcaaaattgtgtcttttaatggacgaaagttttccactttcgtgttagtgtagtcagtttatattttcctttttctgtgttgtcaacaatttttttctttaccctaagttcatgaaaatatgtattatcttctagaaatcctattgtttaccctcaccttcagatctgtagtctatctgggtttatgtttttgtatatggtttgaagttgagagcaatatttatttttctcttctacagagtcaattggtgcagtgacatttattgaaaagctgccttttctctatcatcttactctgttaaccttactcagaaatagtgtccatacatgcctgggtcttttcccttttatgctgttctattcatctacttgctatccttacatcaatttttcctgtcttaaataatgtggatatgcaatatctaatatatactttctattagattatatttaataatatgctacagagccatggttctcaaacttggttgtgaaataaaaatacctggattgattttaaaatataaatgcctaggtttctcctcaagaggtaaagatttaattatgtaaaaggtaaggcatcaccatcagtttttgaaaatcttcctgatgattataacacacagccaaatttgataactactgctttagaacaagttctctcaatttattattcctctttaagtttagcactttgaattttcacatacattttagaattaacttatcaacttcctcaaaagtcctcctggaattttgattagctgtgctttggtttggagaaaattggcatcattttaaattaagtcttctgacccactaatctggtatagctctttagttatttaagtctatttcatttctgtcaataacattttataattttttgtacagatcttgtattttttcagatttattcttagttatttgattttttcatgccattttaaatggtatttttaaaatcattttctctttgttgtacttattgaattttaagaatatatctttaacattttgtatatgttatgtgtacatttgcattgtctgtgaatattgatggattttgcttctactataatactgaatagaggtaatgataaaaaaaagatctctgtatttcattcatgaccactgagagcaattttcagtaatccaccattcatgatgtttgttttaggttaaattagttctagttttctaacaggttttaaaaacttgaatatatatttgacatttatcaaatattctttttgtaacttttatgataattacatagttttttttacattaaaaagtgttaaacatgcttttaattgtggaacacaaccaatggggtcatatttcactgaatttggcttactatttttttttgttagaatgtttgtatctcttttagggaataatattggcttatagtttttatttttttgtaatatcctagccaggctttattatcaagttagttgaacttacggaacttcttggttggagtcttttgttattttcctaaagattttatgtaactttggtgttatcgcttatttaaatatttagtagaattttcaatgaaggcctcctgagctgagatttctaatatagaaatgttttaaattatgacttcaattttttaatagtaaagtctttttatccatgagcatagtttatctctcatttaaacaagagaataaaatatcttctacataatttatcacagtttaaaaaagtgtctctatagagttcttatgtatcctaggctagttcctagaatgcacacacacatacttatatcatgtgtatatatatattgctatattgagatcgtattttgtctgttttcccattgattgtctctgaagtgaagaaatgcagttaaatacgattagtaatatttataaattcccttgttaattctaatagtttatattttttatttcactggttttcttaaatagacattaatgtcagaaacatcaagttgtgtctctttcttaccacaaatgttttttcttacctttttattacaggctagagccttcagtattatatcaagcaatagtggaaatccttgtcttattcctagtcataaagaaaatcatctaaagttccttgttaatatattatgtactaaattttggtgtttaacctttactcaactaaggaagttcccaactattctttgctttctaggagttttccgaataaataggtattgagcttattaagataataatgtgatttactttctttagtgtgtttatgtgagttaactttaaagatttttcaaatgttggaggatcctttcatataaatatatgtattatatatacatttttttcatataaatatatatattcatataaatatatgtattttcaaaaagtatatactttttgaaatacaatgtaggaatttgatattatatttaggatttttacatttaatcataattaaaatgagcccatagacttattcattttagatttaagataacattagcttccgaaaatgagttacataaattttgctatttctgttttctgagataattttctaaaagtaggtttaacatcttcttaaaaatttgttagagtgctcctggatgacctactaaacatggaatttttttgaaaagaagctagaatttggttttgttaatattctctatgttttgtttcttttattttttctgattcagtctcgtttattttcttgtttgtctgttttctctcttgctacttttccagcctcctatgttgaatcggcagccatgtttaatactttgcttcttgataaatgtgttttaaactattatttttttctaagtatttttaactgtttcctataacttttgccatgtagcattttcattattcctcagatctaattataatgtatttctttttaaatccagtagctattaattttgtttatttagtgatcatataagattttatttgctatccttttgcttttaattaataatttcattgtattttgttcgagattgatagtctttatttggaattggttgtggtttcctttactttgtggtatgaaacatgttctactttggaaatgcttcctgtgtgctaaaaaaaagtatgctttgttttttgttataacacctctctttatatgccaaatagcttgagtttttatttgttttgttcaaattatttctctcactgcttatttttcatatgcttaatctctcatttactttatctgttgtacatctatctggttcactcttcatttctgtcttttatttcatcaaaatttttttgaggttcagttgttccatgtgcctatgttagagagttacatctttttactgtattattatcctttttccttgatgattttttttctttaggttctatttttttagaaaatgttactattccagctttcttttggtatatcattttctaagcatttgtttccaatattttggggttctattttttgttttatgtggaaggaaacatattctttgtcctctttctgccttttgtctcagttcaggcagtggagccagattccacccgtcctgtggtgatgatgactctgtgacaaattttgggggatgggaggtttaaggaaatttgaaagaggctgatgtcaaatcatgtgaggttctgtagtattggattgaatactcgccgttgacaaccacagtgataatagggagaatgttcatcacaagaacatgttgctcaagcatttattattttaggagccgtatcgatgtgaagcgtttatgccctattgatgtgaagcacagaattgtgggttataaactcaggactctgcctcttggataagttataaatgagaggtgattccatggtcaacttaaaacattgaacatttgtcctttgttacaaaaaataggttttatcacaaccttgaggtatgatgtgaagattaattgagctatggcatataaagaatttagcaaaatgactggctgagatcaatctttcagtaaatcataactattattattattaccttaatgctggtatattgtaaagaaactggtcaattatttcaaaaattaaaacaaaactgatttgaatttttctactgttacatataccaacataaattgaatatgaagaaaaatagtaaaaagtaaaacattaacaataaaaccatttaaagaaaccacataaaaatgtgaaactgaaactttacaaagtgaaaaaattaaatttataaaataaaaagcttccttattccaaaaaaacccaaactacataaatgtggaagaaagactaactctacacaaggggaatatttacataatatagagcaaacagactataaatatcctgaatgtataaggaattactaaataacaataaacaaaagtgaatataaagatgtaaaaggcagttcacataccatactaatattaaaaaattcaaatctactatcaacaatgctaatgaaacaataaatcattatttctctttcaggtcactggtattaaaagattcacaaaagttattgtaggcatgaatgtgtggaaaggagccgaggcacacttggtaatgtgtaaacggttacagactttcgaggttgcaactgggtaatatttatctacagagaaaaatgtttataaacatccaatcactagaaattaattttaaaatacaattacaaaaagcaaaataatgattatattagaatgctcatagaagcatgttttatagaaaaatgttaagcgagcctagaatggaatagcttacatacatcctaataatgcattatcaggcattgtcaaagggtctagaattacagttgggaaaaaaagtaaagccctcccctcttggagcttatattctagtaaatgggacaaatgacaaacctagatttagaatatatacaagtgtcatgaagcactgactggagagtaaagcaaggtgaggtgaaaggtgatcttttgatagggtgaccggggcagattatctctgatgaaatttgagcagggacctgaataaactgaggaaataagccttgcccacatctggaagaacatccctgctgaggacagaacaagtgcaaactactgaagagcttgcttggtctggataagaaacagggagcagcccagtggtgctgaaggcaaggaattgggggaaggatggtgggagaaagactgaggcgtgggcaggcccagaccttgtaggccttgaaggccagagtgacactgaatgtggtacagagtggggctgggaaacccgtaggacctgtaaactaatgtggtcagggaaggccactctgaagaaatgattttggagcagagacttgaatattgagaaggaatcagccaaggaaagatctaggttctggagtgttccagagtgaacagacagtgcagacatctggggaccaaaaggagctttgtctgtttgaggaagagaaaacatatccctgtaccttgagcacatataaagcagggagaagaacatatgagaagaggtttaaggagtgggcaagagcatttcaaggagtttgggttttatgagacgccaatgaccagtttgagcagcagactgacaagacctgattgccatttgaggaagatcactggctattttggggagaacaggcattagtgaggcaaaagtggaatgatatattaggagactgcaataatctagaggagagttgatggtgccttgatttagtgtgaagagaaaggaacagttcaagagatgctttggaggtagaaatgtcaggactttctttttctttgtttctttctttttttttttttttttgttgagctggagtctctttctgtcacccagactggaatgtagtggcgcaatctcagctcactgcaacctccacctcccggattcaagcgattttcctgtctcagtctcacgagtagctgggactacaggtgcccgccaccaggcctggttaattattttttcgcatttttagtagggacaggatttcaccatattgatcaggctggtcttgaactcctgacctcaggtgatccatctgccttggcctcccaaactgctgggattacaggtgtgagccaccgcgcctggccgaaatgtaaggactttctaatggatttgaaattgaggtgagaaaatgaaaagactaaaggatgaattcaagattttggcctaaaccactgggtaaatgtttgtgtatttgacagagtcatgaagaccaggggaagatgagattttagtgagaaaaacaaaagttttgttttggacatattaaatataaatatctattactcagccaagtggatatttcaagttaggcaattaaaaatccaacttgggcacagaggatgcttgtggttggaatgccctatccattacctaattgatcaggactttatttgatcaaaaacctcatcaatttaaaaaaagaggatgccgctttccatacatgtatttctctattgatatttatattccttccaaagcatacataataataaaattataaaaaagaaagataaaattgataatatacaattttaatttttgttaataatatacactatttttctcacaaaagctgttaattctattgtaacaactagctagtttttaaattaatatataataattgtacatatttatggggtacatgtaatattttgattcatacatacagcgtgatcaagttagagtaattaggatactgttcacctcaaacattgatcatttctttgttttgggactattccaaattttttcttccagttattttgaaatagacaataagttattattcactatgatcaccctactgtgctattgaacactaggctttattccttctagctaactgtatttctgtatccattaaccaatctcacttcacccccttctccccgctaccctttctagcctctggtaaccaccattctactctcttccctccatgagatcaatatttttagctaccacatatgaatgagaataaaacatattaactatcaatctatttttagcagaagtcatgttactgaaaattattgaaaatactacatgtttttattactgaatactgttttggaaaatgctgattatcatgtgacccagtgattcgaatggttctaattaatttattttagtgcttgttttgaatgacagctattgaagatacctcatcaaggtccaatatacattgtatgtaatctactcatacagcaggtttatcattaatatttgtggctatcactctgtgaaataatcttcataaatttcatgttgtgaaataatcttcctaaatctgattttggcagtttcattagatagcagttgtacgcagacaatgacaagattgtgctaatagaagacgtgtcactctatcattttcttcttgatagggcctgcaatctttaattctcaaatgtctgtgttggcatcttgtgacgttatgtctattttgtgagagtgagtatagatagaattagattataacaattcttaaatcaacttaacttcacctgcattatgttgtagtatattgaaagtaaatgaatgaattaaaacaattcctttaactcattttttgaaattcccaatctatcttagtatgtgacttaccatacatgtcatatgactatccgatgcagagataaattaggatttttaatattaaatactagcaaccttgaaattaactaatataactctttctgttaaatattagtatagtttagttttcttatttgttttatgtggaaatgaatacgaagttctactattttccactttaacctcatatcttgtaatactctttggaatatgtggcccaatttagagatccctgcaaggagctaacacaattgatgttatgagtccctctcagattaaagctgtggataattatgtatgacatatgccatagataaattgacttgtgctatcttgtcctcttcagttctttaagtgagcagtttataaccaaagaacaaatctgaggaaaaaaatggtgttcatctattccacttttccacctcttttgagtacatggtatgcttgtacttcccaacccttttgtggtcacatgatcacatgacttgtattggcaaatgtactgagaacaaaaataatatgtataatttggaacagatactttaagaaccagttcataattaaacatatttcatcatggtagactatgtcaaaatgaaatcttcaatagcctatgttgctaagtgactataattagcagagaacatgtcctcatccacctgtacctgacatgtagtgaaataagaaatatgctttattgtttaatctctgagattttgaagttgttatcttaatataagctacacttctctcactgatacaataaattatttttattatgactggaactgaagttattatcaacttcaaaaaattcaaaaccaggcatattctaaagagagtcatataatgtcagggaagttacttgggtaataatgctaccacatgttcataagaaagtgattttatcactctattcaggaagcatctgttgcttctttaactactcttcatattgctaacattaccatttacccctgttgactttgtatatgtagccattttggtgttgatttaaaaatttggcaaaaaacaaaattggtttgcattatgatctcttttgaagagctggatattaatttttttttgctttagaaaaacacatgtgcatggttggtaattttataaatgcagaaatgcataattacccataatgccaccaaacagagagaaatatggttaacattttgatgtattctgttataatttttataaaaatatgaattaactttcaagaaaagaaaattgatgcccaaattccttttccccatgctttatagggaaccccataatttcccacaacttccatttatccccttagttcaagccatcataatttactgctaagattatcaaaatctcctaaatgctcttccttctttcatttctaaaatctattctcaacatagcatctagaatcatggatgtcagattatgtcactcctctgttaaaaaccctccattttttctcaaaataaaaatcttatatgggtaataagtccccacattgtctccatgttgcattatttatctgagtttattgcttattaatctgcttctcctcctagccatactagccacttcactgttcctcaaatttggggatattctcctgccttaaagctttgttcacacttttcatctggaaaactcttcttcaggacatcgacttgactaactcccttctctacgaggtttaccccagctgcctctttattcttgcaatttttctactcccctttccctggattccctgtcttccatattccggtcttcattttcctctgtactgaagcacctagctctttcttacgtataagttaggtatagcatgtttttatgtcctctcttattagatttttcttacagttttatcaaggtataatttatataccataaaattcaaccactataagtatacaactgaatggttttaagtaaattgatagagttgtataatcatcatcgatttaagaccattttcatcatcttaaagaattagcctgggttctttgccattaatctctatgggcatttctagccctaggcaacaactgatctgctttctgtctataaatttgccttctatagacatttcatataaagtaagtcatacaatatgcagtcttttttatctggcttctctcacttagtatgtgtttgtggttcatctatattgtagcatacatcagtattttgttcctttttattggtaaatagtattttattgtatggatataccacatttcgtttaacaccagttgatggacactcagattgtttcatgattgcaagtattatgaataatatgtcattttacatttttaccattaatgtataaggatcccagtttcttaacatccacgctaagacttggtattttctccctttatagccagtggtatctcattgtagttttaatttgcatttccttaatgacaactaatgttgagtactttttcttatgcttattagcagtttatttgtcctctttgatcacatgtctcttcaaatcattcacccatttttaattgtgttgtcttccttttactgagttataagaattctttttttattctggatatttgatttgcaaatatattagatatacaatttgtacatattttctttcctttgtggcttgtggtttcattttgtttatgttgcctttgaagcaaaaagttttacattttgatgaaatccaatgtattttttggggggggaggtaggggagggctcatgcttttggtatcatgttacctaacctgagagcacaaaacttttctccactgtttttctgttgggggtccccaagatgaccctcactaattctctagaagaactcgaactacataagctattatactcatggttatgatttattccagagaaaagatagtcagcaaaggaaaacagcagtatagggcagagttcaggagaaaccaaacatgagctgtcagttatcctctcccagtggagacatatggacagtgcttaaatctcttaacaatgatgcgtgacaacatttacaaagtagtttcaaccagagaagttcatctatactttcatgtccgaggtttttttgtgtggaaagcctcataaacatggagtgcccatgggactgacctcagctactcagtctccagcccctacaaatgtcagacttatacagtgtggtccaggaccccaagtgaacaaaaacaggaatttaccagaagtcatgttgttagcataaactttctggtatggcccaatgttccagatacacaaaaacacttttatgcttcaaggactgtcaagagctaattctttctttggaatatatgagggttgagtactccaagtccatggaattaaccctttgctgcatggttttattttgggagagttttctctcttatctttgggtctataatccattttgagttagcctgaattttcttgatttgtaaatccaactaatggaaaaactaaacctaactatgaatccatttacaaagcatgctgggaatgactcaggtagaaaaggctgtctctacttgggagaagtgagggagttaaccaaagaaatgtctgggtgaatggtgtttcaagttgagggaaacctctttaccaaaatgttatggtaggaaggtgttgggatgttataggaaaagtgagaaaccaatgagcctggaaggagggggagagtgatcagaaacgatatgagagacaaaatggtggagaaccacatatggctcttttggacattgcaatgtccaatggggaaactgtagataccaaagtaaatcagccaaaaccacctaatctagtggtagaacttttttcttaactatgaatttagagagcatgagccactaatttttaccatttatcaaaaagaaaaatgttgatgaagccacacacacatttgtaaaagtcaaagcatagttgtgtttaactcagcccaaaagtatgatgctcaaaagtgtttcttgtaacaatttgtaaatgccaagaagttgtcattcccttcttcagagttaagatttttaagtactgtattttggatgtattaaatattatactatttcttgttcctgcaaaaaatatgttaaaatcatggaaattattccctagtattgtttatctatctcccttcatttcttccttttctttcttcttctttccttctttagtttcttctagaaaatgaataaagtatgacctttacccttaaaaattccaaagactagtaaaagtagatagttttttttattttttatcagtatttataatacaatgtgaaaggtgctctgtcataaactgtttgagaacactggggagagtataactcaccactcagaaaagtcagagaaagcttaacaagaagtagtaataattttgctaggacttgaagcccaaatagaagataacctggtaactaagaaactttcagaatgagagaaaattgtttagaaggttatgcaagttttaaagctcaaaagggggttcagaaacttctcagggaatagtagaaaatcaggtcatttgtggtcatattttaaatggcttttgaataataatgaggattttgaatttctaatcaataggcaactacaaaaatacattatttttataatatgtgttatggactgaatgtattctcccccactccaatttatatgttgaaaccctagtgtgactgcattagaagatggggcctctaaggaagtgattaggttaaaggaggtaacacaggtgaggccctgatctgataggattagggtccttataagaagagatacagaaagctctctgtaaacatgcacacatgcgtgtgtgcacacatacacacatgcaatgaagaaaggccatgtgaggccaggtgagcacagagagaaggcgtcagtatgcatgccaagaagagaggcctcaccagaaactgaatcaaccagaaccttgatcttgaacttctggtctacagaattatgagaaaataaattcctattatttaaactacccagtctatggtattttgttacggcagtacgaggcaaaaagtcatctcagatgagtatattagacatccattgtagtagacatttactagaagtgtatgagaaagagataacagcaaggggttaatagcagctgtgcagacagaaaccatgttccttttgggtagaatattctgaacttgacagcttatgaaaggcagtgagcaagagggggagttgaagagtctagactagtagtatggtagatgataaaaacattaattgaaagagtaactaaaagagggggtgcctaattcagttatattccaatgagtttgaggcctttataggacattcacatgcaaatgaacattagatagctgaaaatgcacatctaaagcaaaaggaatggtagagttgtcagggctgacattatggatttgcaaatgagtgaaagaaatcttgtggttttaaggattgtcctattgtccatgtgccacatgggaagaaatacttgggtcccaaagaacaccaacatgggaagtatggacaaagtgcagcctgtaaagcaaaacaaacaaaccaaacaactagtctccatgttggaagagaagcagcagagtgtagggtagtttgttgatgaaaagaaatggcatagagcaccagattgagagaatgtcaggaataaatgtttggttttgtcaggtgatttgtagtagggtattaatgattattaaaactgtacctattgaaggcttgctatggaccgggcagtgtgccatgttctttttttatataaatttgggtgtgtaagcacatataatatatatataacacagatgctcctcaatttgtgatggtgttgtgtcctgtaactgtaaactgaaaatatcataaatcaaaactgcatttaacacacctaacctactaaacattataacgtagcctagcctaccttaaatgtgctcagaaccctcacattagcctacagttgggcaaaataattgagcacaaatcttattttataataaaatgttgaatatctcatgtaacacattgatactgtactgaaaatgaaaaacagaatggctgtattgagtacttgaagtatggtttctactgaataggtactactttcacatcatcataaagtcaaaaaattgctaagtcaaaccaagtatgggagtctgtatatatattttatatgtgtatgtctatacataaatatgtgaatctatataatgcaacatatgtaattaaataatttgtatgtttggctacatgtaaatttagtgttcatatgtatatatatacacatatatatttacttttatttaaattagttaatttattatatttataaagatatttagcccttgaagatctcttgtgagattattaatattatttgcatttttttagggtctcctgtttgtcatatcaccaacctctgctatagggataaaacttacagtaaactttattattgctctgctctactgaagagtttaaatgagaaatcttataggaaatgctatcatcatagaaccaacaatgtcttgtaagatattttatgacaatttattgatggcattttggctacacaaatttagttgttgaagtaaacatgcataagaaatcactagtagtaactacgtttgtcttgtcttttaataacattactaattgcaatttgataaatatgacattgaaaaattaactctacaactgattgaataagtatgttgaataatgatgcttagtgaattatgtattatatgaacatgactcttatggatctgatgcatctgagagttcatacagcaaaaatcatgcctactttaatgcccatataattattttatggctaaatgaatttaattttttcgggctcaaataaaccaagcagtgatgtggtagtaaaatcagggcaaatttgaaaatcacagtattgtattctactcgcatgtattcatatttcacaggttttaaatacttagacaaaacaaaagcttttttttaagttcttaaaatttacaacatttatattttttcattagactcaagtggaatgaaattaaagtctaatgaaatatggcctatcacatttaaaaaaaataatttcaactaaatggaaagagagcaccagtatttttctacatgagcttgtatttgtaaagattcattgaagacaaacattacgtttctaaagtagaatttttttacatgtttacatgtagataggcaggacaacctaaactcacacatgttggaaactgtaaactttctatatctaagcttgtaaagtatgtaaaatttattatatcctgaaacttaaaacatttaaataagtttaaattttctctatttgtgtcaattttatatggttgggcactaaaatgactgtcagaatagaatctggaaaccttaaatgttcaatttcacattagcctacagttgggcaaaataattgagcacaaatcttattttataataaaatgttgaatatctcatgtaacacattgatactgtactgaaaatgaaaaacagaatggctgtattgggtacttgaagtatggtttctactgaataggtactactttcacatcatcataaagttaaaaaattgctaagtcaaaccaagtatgggagtctatgcaaagatagtaattttagctacatacttaaaaagataatcttgtttgaagagttttttttttctttaaaaacttggagaccattttttttttttttttgctgtataagatgacacttcagctactatataacttgtctactggaatgccttcaaggaatatatagtagaagtcaataaaaagttaaccttttagtgtagccattatatttttaaaaataaagataaaaatgtgaagtttaagaatgtaaatttgaagtttaaaagtttagtgcatttttgtatatgtgcttgaatggaacacatttctccctaaaatttagcttaagcttaagcaggccttattgtagaaaaaagccctaaaacaggtgcattaaaaacaagcaaataaacttagataaaagcaatgccagttgtattattttcaaaagctgtagaggaaaataactgccagaaaactttttgtgttatttacttaagtgaagatgtgccaaaatgtggacatttttgtacaatggagtatgagatttacatttataatagagtgttcatacttaaagataactaagttctttgttgttaagtaccaattttgactatgcaatacaaagttacaaaatggagtactggcaaatgttttttcctataatcctataaatatagattatgtatgtacttccttcattttgtaagtataaacaagtaatgagcaagagattaagtaaaattttattttttattatctgctagattttcaaattctgtgaaatgaaaattttggttaaagatattaattggctaaattcatttttaacaagtacaaattattggtcaattatttaactttaaaacattcactaaagaaaaataaaaagcaagacttactttaagattagtagttttatggttttgtatattatgatactggtagattttgttaggcactgctaaatgaccagtgaataagtgttgagatgggaaagaaagtgacttcaagttagtgtgcaaaaaaagatgataaaacttggattttagaaatgtctgctttgatgcaatagtcaagttcttgaatttaaaaactttacattttacttggaacatctaatttgtttcacactcaataaatacttggaatcatcgcgtcttttaaaactaagattttaacaaaagttgtgaaatgaaatgtctttaaatgaaatactttttcacaggaaataaaactttttacatggaaatggtcagtcattacttaaaaatacttttttgttgttattttaaaaataacttattaggacaagttttttgggaggcaattttcagctactctacataaacagattagctgtctgattttctggttcttacaaaaaatagataggactcaagaggttttttgtctacattagaagggttggttttagtgattcagcatttatgtcagttaaggaaagaacacctgccccataaacaatgtgtgaattctaaccttctaaccacagaccaaagtgcttttttttttttttttttaatttgtcttttggcatcaggaaaagcttaaaacatattcaaaaaagttttttttttttcctcaggactcctgaaatcaaatcatgtgagttcagaaataactgttcattagcagaaaccaccctgatttttaaaatgactaacagttgtcctaacccatctatctaaacacagcatatatatttattccagtaattaaataaagatcagcagctatttggcttgctcaaagagtttatggaattttgaaataatggtaatttgaactaatcttagatgagatacaggcttgccctccatttttccctcccttccatcctccttttaactttagacaaatgagattggataattttaatgtactgtttgacgcaaatttactttgagcacctgttgtatgctgtggtgaaacatgatgcatggaaaaggggaacatataaaataaaagccccagccatcaaatttttcattcaaagaaaagatacataatataattagaggataataatagagatggcacctaaaaagtggcagatcaactgtacatgcattgcatgcctaaaaaatggaggaaaacggcatggctgtaacctgcgtgactgggctacacccgggggaggagtctgggcagggtgggcttcgcagctgggaggaaatcaggtgcccgaggtgggggcgcatttcccggagctggtagggaaaataccaaactgtggaagtggcctaggcagccgggttgtaaatagttgaagaccagcttggttaggatccagtccagcagctccagctcacggaaggccagaggcagcttctccatccttcttccccgactgcactaagtcctcgttttttttctttctttttctacaccctgcccgcaaataatttgctcattttttaaaaaagcaatattctacatttctggtaaatctgttcttttttttttttcagagtgacacagcattctagatcactgaaactaatctcattttacagagacatttacacacatttttagaaaattatttcagccattatcaataaagagaagaataaaactttcttttcatattaacaggagcaacaattatctttcttcatgatacttaaatataaggaaacagataatcaatgagtaaatgaatgtccaagaatattcatttatccagctgacactctttgagtggctacctaatacctgtcaggatgctgaatttggagcaataaagatcacacaatcatcatggccctaactctcaaaaaagtccaagcctcttgcagagttagacataagagttacaaaggcattttaagatatgctatttgttaacatatgctcaacaggttagaggatcattcctggattgatattgtttctgtcaacaataattagagcaccgaaattttcatgtaatatacctcagagaacattttcctctgtgcattagaaatagcattcttttgaaaaagattttttttcctaaattgacatctagcaaattacttcttattgtaacagaggctttaccatttaaattagtattttaatccacaaagatataaacaagaatacaatttttaatttctgctgttaagaaatttctcttcttactagaaacaataagcaattcattaaaaacctgacagtggaaattaactactgatagatgccattcatctgacaagtgacctatagcattttatttttactgctgggcttcatgctagttgcttttctaattcagatccctttgaaagacaaagcagaattattcaagaaagcatcatgtttttagaaaaccacaggctcactgctcagtaatattcagaaatttctatttattaatttattgagaagtattaatctcatcttatttattaagagtcactagaaaaaaattcatgccaacctttctggagaaaatgacttttggtcccaactgaccagaatccattttgtcattcaccttaatttggttatttttggtcgatactcatagccttcagttcttgaaagtagatgatagctatcagtctcttaccccataaacctgaaggcctagtacaaccaaaaaaagtctaacatcaaattttgccaaatgtaaaaagcattttttttttgcaaatagatataataacagctatatggccacgtgtcagcttgatgtagtcccagctgtcttttgaagctgtctgacagtaccttgcctgaaaagttcattagagacttctgcaactgtgtttcagcagcaggattcagctacccttctagttagaatcaggtaacaaaactgttttgaatcagctgctgagctggaacggtagagcatagggcccatgttgggttcacaagattcttataccactttgcaagaacaggaatgcctatgttatatttgcaactaatgaacacattttgaacaccactgatttcacccatgaagcagccttactaaaaaccattattctaattaacaaagcctgtattaataggaaacaaaagcatgtgatatttgcggtagttgttttaagagcatggacctttgattagtctttgcatgttgtgtagccaccctgggttttatttctgattagtgtatctcaaatgagaactagcattttcctgatcctttccctgtggttaaaactcttgaacagatgcatacaggcatacttcatttttttttgtgcttcacaagtaaatattgctttttcttttttaacaaattgaaggattgtggcacacctgtatcgagcaattctattggcaccattttccaccaatgtgttctccctttgtgtctctgtgccacattttggtaattcttgcagtatttcaaactttttcattagtatatttgttgtaatcatctgcaatcaatgatctttgatgctactattgttattgttttggggcaccacgaacagtgagcatataagatggaaaatttaataaatgttgtgtgtccaactgctccctcgaccagccatttcttccccatctcttcctctccttgtgtctgcctattccctgagacacaacaatatcgaaattaggcaaattaataaccctatgctggcctcttaaatgttcaagtgaaaggaagagtcatactctctcactttcaatcaaaagctagaaatgattaagcttagtgtggaaggaacgtcaaaagccaatataggctaaaggctaggcttcttgtgccaagcagttagtcaagctgttattgtaaaggaaaagttcttgaaggaaattaaatgtactactccagtgaatatatgaatgataagaaagaaaaacagccttattgctgataagaaagttttagtggtgtgaatagaagatcacatcagccacaacattctcttagccaaatcctaattcagatcaaggccgtcaacatcaaggcaggaccctctaccagcaaaaagattatgactctctgaagactcagaggattgttagcagtttttagcaacacattggttttaaattaaggtatatacattattttttagacataattctattggatacttaatagactacagtatactgtaaatataatttttatatgcactgagaaaccaaaaaatttgtgtgacttgccttattgtaatattcatttattgcagtggtctagaaccaaatctgcaatatctctgagatatgcctagatgtatttcattatctagctgaagtattttaagtaaattataagggtattataataatcttaaaaatttatttccacgtatgtccaagatgctctattgtcactctgagtggaggcagatctagccatagttaattgctttcgtttagttttgttttcacactatatctttaactaactcttaaatccatatgctattctaagttgatttatgttgtctcctgactttcctttacctgcttaatatgctacaatatttgcaaacctaaccaaactttgcaatttactaaggaactttaaaatactgcatatttgtgggtttcaccatggagaatctggttgagaattttggaagataacccaagaatctgtattttaaaactttccccattctaagacagtctgtatgcaaacaattgttgaaaaggaattagacaggaccatctctgtttaaggatgaccatttgatgtaagaaacaatatatcaagaactgaactctttgcttccttccctatttttctgcatcaatgaatcttagtgccctatcattctcctaataccccagcacctcaatctggaagtcagttcgatcttatttttttcacttgaaattcactagtgccagtgcctggtggtggatcattttgatatttgcagctgtcatcttatttagacgcttgtgcatgcctggttcactctgtaacacatttcattgcctgtagtgtctcttgccactctgtgacaactgaggaaaaatttcttacaataacaatgctatattgcctgcatttccaatatattcttcttgagttttctccaatcactgaatttttattttgtaatcagatcatgtaggaaaacattggatgtcagataatcggttaacacattaatttgtttaaatcttaaaagtggtatttttactttctggaatgccctttctatcaatattaataaccagacatccagactgacctcatttagctataatcacatgtcaactatgtagaggattatacttcgatttgtttgttgctaacttcatcggcatgagaggacaatcaaggtgacacatgacacatagatgaccaaattaccaaagctctgaaacagtctaccaatggcaaaactgcagctctcatttttgtttttaatctttttataccactgtgctgttcaatacagtagtcactagtcctatgtggctctttaagtttaaattaagtaaaagtaaatgtatgtaaaacttgagttcctccgttacattagttacatttaagtgctcaagagcctcacgtggctattagctgcagtattgggcagctcagattatatttccaacattgcagaaagttttactggatagttccactgtggagtccctctggaagtctcaaggtgggaagagactcacatttccaatatcaacaaacctactcgcctttctccctgctatgttgacttccctaatggctttctgcagtttgggggtttctacattgtgttgaggcttcttctactacttcaccttgtatgcacatgcttctgtgtttgacaaagactttctctgtcactggtgtcaaaagttgcacacatacacacatttatttaagttaaacaaaataaactctttattttgagatgaatgcagattcatatgcagttgtaagaaataatacaaagagatcccatgtatcttttactccagtggttcccaaatttttggcaccagggactggtttcgtgaaagacaatttttccattgattgcaggggcagaggttttggggatgtttcaagtacacactacatttatcatcagattattagattcttataaggagcacacaacctagatcccctgcatgcatgcacagttcacaatagggtttctgctcctaggagaatctaatgcccgctgatctgatgaaaggtgaagctcagctttgctggctgttcagctgctcacctcctgctgtgcggccagcaccagtctgtggcccaggggttgcagacccctgctttactcaacttccctcaatgataaggtcttacaaaactgtaatacaatattacaaccaggatattgacattgttacagtcaagagacaaaatatttatatcatcacatcacccatgttgcttttttatagccataccttcttcttaactcctttcaaatttaagttcagaatccattttgagtcaatatttgtgtgtgtataatgtgaagtttagtacacttgactcttgaacaaatggtttgaattttgtgggtccacttatatgcagatttttaaaaataaatatattggagatttttttggagatttgaaacaatttgaaaaaactcacaacgtagcctagaaatatttaagataaaaactaagaaaattaggtatgtcatgaatccatacaatatatgtagctactaatctattttatcgtatactaccataaaatatacacaaatctattataaaaagttaacatttttcaaaacttgcacatgcctttacagactgtttatggtgctagtcacagttgagagaaaggtaaacacatgtaacagatgcagtgttaaatcacaactacataaaattaactatagtaatattgttctaccataataattttgtagccctgttctgttgctattgtgatgagctcaagtgttggaagcatccaattaaaacaccctgttacactaatcatctccttttgagtactcatcctctcctacaaattgtgaattgcagtaaaaagtgagctcattctcgtgtacaaacgttccatcatagtgctataccgtaaaccttgaaaacagcatgagacctacaaagtgctactaatgatgctattggtattcccaaaaagtaaacaaaagtcataacattgcaagaaaaagttgaattccttgatatgtaccatagattgaggtctgcagccatggctgcccaccatttcagacagatcttataaacaaatgatgtaaacttatggtatcaataaatgcaatactatgaatgcattttctattccttatgattttcttagtgacattttcttttcgctagcttattttattgtaaaaatacggtatgtaatacacataacatacaaaatatgtgttaattgactttatgttattgggaatgcttccagtcaacagtagcctattagtagttaagttttgggaaagacagatgctgtaacatggatttttgactgcacaaggccagtgcccttaacccctacattgtttaagggtaaccagtactaggttaattattttaattttatggatgtccaatttttccagtactttgttgttgttctttaaaaagcttgcttttgaattgcttttgcaaatttgtcaaaaatcagatgggcttatttctgtggcgctgtttttgggggagtacattttcttcctttaatacgtatatctattcctctgccactaactatacagttctgattactgtagttaaataatatgtcttgacttgggtagttgaattcctacctcctttggtcttcttttacgaaattgttttagcgtgtctagttcctttgtctttccatatgcaattcagaatgatctcatctatacctacaaaaaatttacaaaaatgttgataagaattgcattgacctgtatatcaatttgaggaaaattgacatctttacgttgttgagactttcaatgaatgaaaacagtatgtctttccattccatttgttaagatcattaatttctcacatcaacatcttttagttttcagcatacaagttctgtacatgttctattacactgatgactaagtatttcattttttgagcaatcacaaatattttattttgaatttcattatccacaggttcatagctagtttcagaaataaaactgatttttgaatattattctagtattctacaactttggtgaactcacttaatagttctaatagtgttttgttttgtttttttagattcctttggattttctgtgtagataattatgtcatttggaaacagggactgttttattttttcctttccaaggtgtatgatttttattttattttcttgctttattgcactggctaaaatttctaggactatttgcataagagtggttagagtggatagcctggacttgtttctgatcttagggagaaaacattcaggttttgaccaccaagtataattttatctgtaaagtttttgtttttgttttgcttgtttgttttatagattctccttaccaatttaagcaatttctctgtactcctagtttttctgagagttttttgtttttttcttttgagacagagtctcactctgtcacccaggctgcagtgcagtggcgcaatctcggctcactgcaacctctgcttactgggtttcctgcctcagcctcctgagtaactgggattacaggtgtctgccattgtgcccggctaatttttgtctttttagtagagatggagtttcaccatattggccaggctggtctcaaactcctggcttcaagtgatccacctgcttcggtctcacaaagtgctgggattacaggtgtgagccaccactcccagcgtaagagtttgttttttaaataaataggtgtaaaattttgttaaatgatttttctgcatcaactgaaatgatcatttgcacctgctgccatacctttttttagcctgttaatgtagtagattacattgattgctttgttgatattgatccagccttgtattcctggcattaaccacacttggtcatggtgtataattctttttatatattgctagattctatttgctaaatttctgtgaaggatttttgtctatattaatgaattggtttattttatttatttgtttatttttttgatgtgtgctgtctgtctggtttgggtataatggcaatactagcttcactagctaaattggtgagtattcccccttccatgttctgaaagagattatctagaattgttgaaaatatttccttagaagtttggcagattgtttccagtgaaacaatcagggcctggagatttcttttttgggagttttataatatgaattaaatttccttaatagttatcggactgaacaagttatctatttcatactggatgagaagtagtatattttgttggttttttctcttttggaggaactggtttatttcaactaaattgtcaaattatgtggtaaaattgattcccttattacatttttgatgtctgaatgttctgtagtgctatcctcttattgataatttgtgtcttttctcattttttctttttcagagttgctagtattttatcaattttattgatattttcaaagaatcttctctttgcttcattgattttctttatttttttctgtttctttttccatattcttgaattatgagcttagattactgatttgaggctattgctcttttctaatatcaccattcagtgctaaaagttatcctctcagtactgccttagctatgtcctacaactttgatatgttgtattttcatttttattaagttcagtgtgtgtatataaatatatgtatgtgtatgtgtatgtatataggtataaatatgtattatatgcatatataaaattttttttcttatttttgcctcatggattatttggaggtgttgtgtttcattttcaagtgtttggggaatttcttggtatctttctgttattgatttttagtttaattcattgtggtcatagaatattatgattcaattattttaaatttgttgagatttgttttatggcacaggatatctcagcatatgttattgtgggtacttgaaaccaatgtgtattttgctgttgttaggtaaagtgttctataaaggaagatttgattatgttgtttgatgatgttgtggagttcttctatatccttacaggtaatctgtctagttcttctatcagttgttgaaagaggggtgttgaagactccaactgtaattgttgatttgtctatttctctttttagttagagcagtttctgctttacatatttctcagccctgttctttggttgatgtatacatatttgggattccttatcttcctggtagattgacacttttatcattatgtaatgtttttctctgcctctagtaatttcatttgctctaaattttacttcatttggtattgatattgctgcttctgctttctgttgataaatattcacatgatatatcattttccatccatcttctttcaatctacctatttcatttgaagtgagtcatagcatgtctttgggttatgttttttaatccactctaccaatctttgtttttaaaaaaacgtatttaaatcaggtacgtttaatgtaactattgatatggcaaagcttacatctcctgttttatttttaattttctgtttgttctctgttttttgtttctttgacactgctacagcaggaagcagtgtctcattattgccaagtaggataaaaatcccaggtttctctttcaggctctgtgacactttaggaagtgaggattcttattatgtgaaatgggagtgctgacccctcactatgacttcattgacactagccatgttgggaggggtacgagcattgccttattactgggcctctcttggccaccccttacatcatgcggctgggaagtgcctgattgtgctgggcacaagtccctgatttttcagtagatcctctgacatcacctcagtgggaaggagaaaggacatatcagtgcttacgaatgggagtggaagtccaggctctcctcctgatttccctgacaggggttggggaactgttattgccttcaaaagatgtaagacccagctctttactctgccttttctgacaccacccaagcaaaaaatgggggagtgacttgttacagcctggcaaagagcgaggcctaagttctctattcagcctttattggtgtgggtgggcatagagacaatggtgttttgttttgctttgttttgttctgtttttctgtgatgtttggctagattagaatggttattgcttaacaggttttctgttgttgttgtataggatgttcctttcctagccctttggctaaagagaacaggcttttgttgagggttttcttggtctgtgtccactggcatttccaggttgtcagctttttcagcttcaaatctggaacatatgatggtaggaaaatgtatgtctactccatcttcccagaaatgaaagtcctagctgaagcctttgaataaaactttactgtaagtttgagattaatatgcctggaactccgcaaatacagacagcccccaacttagtagtttgatttacgatggtgcaaaagcagaatgcatttagtagaaaatgtacttttaattttggtcttctcctggtcccacaatatgtagtgtgatactctctttggatgtcgggcagtggcagtgagctgccactcccagtcagttacatgatcatgaaggcaaacaactgatactctatagtgcactgtgttgctagatgattttacccagctgtggggtgctttacgcgttctgagcatgtctaaggtagtttaggctaagctatgatgttcaataggttatatgtattaagtgcattttcaacttaagatatttttaacttatgatgggtttatttggatgtaaccctatggtaagttgaggaacatcaatacttgttgactagcttaataaatatcaatactcattgaatagtttaataaatatcatacatatatacttcagaacccagaagcttagaccctttcttttaatgtcttgcaatgttcattcatagttattatcactttgcaatcgtatatttgtataattatttgattaatatattttcttctaacacattaaaatttcataaaggttcagaaaacatcatttgctcaccaatatatcagtagtacatagcactgttattctgtttggcatatatcatatatttaattaattagttgcatagatttttaaaagtcaacacataagcaaatgaagtttatgtatttttcatggatcctctctgaaaagctagattctacccttgcctggtataatagttacttctcagccaaccactatatgaaaaacaacagcttatcgtctccattaagagtgctcctgaaccattcctctcaaccctttaaattatgacagatacatctatacacaatatgaatatttgtttggcacactgggaataaatagacaaggcagcttgtagccagatatcaccagccaaagctatgagtcatcccagatccacctgagctggtcactttaagcaatgagaagttcaatatgttggcacatctgtaaccaatttgtggcacaccagagttcatttgtggaaggttgggaaatgctgatcttgaaggtgtctttatccccaatctaagtccatcttctccattccttttttcttttcctcagaaatattggcaaagaaaataccaatttttattaagggaaaacaaagccccatccataggaggacactgccctgcatcttgatcaagacaatcccaccagcatatgatagtattgtattacactggattattcagtcttaaacatcatgtaaaataataatggtaaaataataatagttgatatttattaagccctaaatagatgccaggggcggggctatgcacgtaaaataattttatttgatgctcaaaaaagccatttgaggtaatattattttccttatgttaaagataacgaagttgaggcactatctttattttacaggtgaagtaattacctgaggtcacaaatctattaaatggagattctggatttgaacttgactctagagaaggcattctcatctgtgacttttaactagttaaatgcctaggaatgaatgaagaaagaaaattgtgtgtgtgtgtgtgtgtgtttaatagtaattccttcagtggagataaacatcagtcttgaaatttcattctacagtctcagactcagcaacagacctcttaactttggtgtttcaaataaaaatatacatttttcctcgataagacaatgtaaaatttacaggcatagcatagtctaatttaaataatgaaatatacatgcctttccctcaccttttaggttaggcactgttagctgttcgctaactatatctgttctccgtttcttctgtagtatcagagtttcagctaaagatgatattgtgtagctttcttgaatcttaatgtggccacttgattaagtttgggccaataggttgtgaggtgtttcatgtgtcaaatatctattgcagctactaaaatgaatggaatgttttctcttctccatttctctttctcactagctgaaattcagacttgatggtaggagatagagcagtcatcttagaacgtaagatgggagatctgttgaagaaagcaacataaaaagtcctagatcctatgataattcaatagaaaccttgtctacttctcactagattgctggttgagagagagaaataagcattttcttttgttgtttaagcaactgtttggggatttattttagcagtggaactaggtttttctttggtgggggtgagttcataaccaactcttctatctactactttgtatcccaaataatcaaacatatcagttgatattatagagaaattacttgcctaagtacagctgcattcaaatcaattgtctcaaagttttcccaagaatacaatggcttatataactaaaagaattctttaggattttccccctagaagaaagaaaggaacagtctttagaaaagagtacctacatctccttttctatagcacagaaaacttttttctttcttggctactgagttctatcaaaagtaaaaaataaataaataaataaataaataaataaataaaataaaaataaaaatcttagtagccttagccaaagctctttgtgcctggcattagtgtctactagcttatcagtttttgttctttatatatttgtgtgtcccttctgtctccagctacctagaatgtaagtttctcaagaaaagggatcttttggcttttattggttatttctttgtgtgtatatcttttgataatatctggttttgtgctctgaaatggataatattagatcttcagtagatgatagaaattgttcaataagagtgattattgagtatttttaaatattatatctctcagttcaatttgttatgaaactttatgcattggtttcaaacatacggaaatatggggagagtgagctcatccaccaaagggcaatttaattttttagaatctttagaatttatttattttaaaatttctcagtgactcttttgagcataaagttttaaaatatttgtcattcttcaaagtaaatgataatgaaattctatctgttttggacttgatctgctaagaaaagcattcaaagagaaaatttgactgcaaaaataaactattaagtagcataactatacaatgatgtacatcagtatttgttttagaatttttagttattgaataaaactatagacactatatgtagctagcttatactgaatagtgcactttataaatgaatatgataaaatttaatgtattttaagaacaaactaaatcattaatctatctttattctttcgattaaagacttcaataaaacagaaaacgaaggaagaaaaagcaaagctaaaaaagatataaggaagaaaatctaaagtataaatcaagtacaatattttacaaatataaggagtgtgagttacaacactgcatttccacccaaatgtaaatattggagattttcctcatattatcaatgcatttctgggactccaggattccattctgttacaaatgattaaccttattgaaaagaacattcaaatgctgtgcaactaatatgagactgatacaattttttcacttaagtaaaaacctcactgccaaataaacataaaatgaatgtgcaaatgatttttaactcattaagtgagggaatcattgaggtgttaaatccagttcaaacacacatgcatacacacaagcaaaagtaaaatcagaaatgccaaaatgaattacagtatagttaaacctgattatcaacctcaaacatataatgttagtgtatcttttctacaaggcatagatcaattacatatctactggaaaaaatcattttattgcagtggaaaataattgtttatattactatggataataatttacatttctattaattttctacaaggcagtataagctgtatacctctgtagaatcagataattcccaaaatgtctgctagacaatatctagctctctactgagaggatatgtagtaatcttttttgtacttttcaagtcttggacaacttttttcctgacaagctttaacaaagtcttgaaacatgatatttagtaaagggttaactcagcaggctttgggtgttcaaactttatgtacattccaaagaaaggactggtcttgactggctccttagagatacgttataaacccttggatcatcctgtccaatgagtgttttgtatactttggacctttggccactctaacatctgttagcatggatagctcatgctaacaaggtgatttttggtggatgtctgtttttttagttttgtttgttttgtttttcacctgaggtccttggccacactgtatgagtttgacctctaagggggtgctgcatatttagtagttaaggtcagttgtgtgtgcactccatgcctttgtgatcaacctccagtaaaatcccaggaccccaaggctcaggtaaactttccttgttagcaacagtttgtacatgttgtcactcatcactgctgggagaatgatgctctgtccatgtgactccactgggagaggacaattggaaacctgtgcctgatttctcttgggctctgccctatgcacctttttcactggctcattttaatctgtattgtttctctgagtaaactgtaaccatgagtataacagcttttctgacttctatgagtcctaatcaatcattaacctgagagtggatatgcggacctttgatacatatggataaacataattttgctggacgttcaggtaagtgttgatggaggccttcaacaaacagaactgagaggctgagacactgatcttgtatcttcaggttgatttagtatttgttaggatggtcatttgtcataatctacagtgaccgcttcctgaatctgatcacaggggatgctgagtagggtatttatagaaatctctggacttctgcacatggtgtcttcaaatcaggcccaactcatcttctccaggatgcctctctattgaactcacctctctgcttccctggcactctcccagaagatagtctaagattattttattccctttcaaactaactgcaaagcataaattctatgaccttcctcaagacctggcttttacttctctcaataagaaacagctcttgtaaatcaaaagctttgattttaaaacttttttttctgatctggcacaaagagtagattttggaagtaaaacacagtatgctttattttttctctttgtactaaaaaaaaatcccaattttttttcagcagggtggtaaattcctttatgtcatgcactgtgccccccttggtctataatctactatagatcatctttcattatttgactcttatattcatatgaaaagattttgacaattatgaaaaatattgttcaattttaataaagcctatcttgtcaagacaattatctccctaagtcttcaaaatgtctttgagtctcagagctaaacaatgactaaaacttcctttctttcctggggaaataatccttatgtcttggctttaatggtagaagggacacaggggaagaatccagctattgatgaggtattatttccctacatttgctgctcaaatttaagacatttgtactttttctactgtaggttttactttgaccattgattggcaaagccaaatattgctagtgtgaaacggctggttattcctcacacaaagatttttagttttctggcaggcaacttcctttggacatctctgacagctactatttagtctttcctggaacacttaagtacacatatttttgagaagcaggattccatgttccacaactccaaggatgccattcacatccatgtaagttgtggttccggtagttttataatgggcaacctatgcagtaaacagtggccctgaatacactccaattgtttgacagctttgtttgttagaaagaacagctgtcttcaaacatgttaaggcttctacgtagaagagttaaaataattgttttctgtatgatttcaaaggctaaacaactgttctagtgtgtacatcccagataagcacagataaaggttaataaaatgaagaaatttttaacagtaagagctgctcaaaagtaaagcagatcaccttaagataaatggaattccaccactgaagatgttcaaataaaatttggacacctgcttgatacagatactgtatggggactcagttatcataatacattaataggataaaagagtatttaaattttcctgctgagatgcaatgattcgagagatcgtcaaagttgctagcacttagagatgtaaatgaaattcaaactcattttataactgccattgggttatatacaattgtgattattatcaagttagagttttatgcctcaattcagacagctgacctggaataaatgattgaatgaggggttctgtattcttctgccagatttcatttgactaagcctttgggagtaaattagcccaatttaaggattaaaatctttaaaaatattagccaagggtgcttaaagaaagcaagataagtcatagtgctggactgggctgggcataattaatacctggcatgccatcttcaactgatggatagtcacctagaactcgatgttgaggattattaggtcatatctggattcaactcaaaatataccttgtatgattagtgatgagagggacaaatggtagaatatactgcacatatttgctgtctctgtcatggagactactcggtatgttatttaggtagaatgcatagaattcatctcctggggctgggtggggtggctgacacctgtaatctcagcactttgggaggccgaggtgggtggatcacttgaagtcaggagttcaagactagcctggccaacaaggtgaaaccctgtctctactaaaaatacaaaaattatctgggcgtggtggtgagtgcctgtaatcccagctacttggcagggtgaagtaggagaatcacttgaatgtaggaggtggaggttgcaatgagcagagtttgcgccactgcactccagcctgggcaacagagcaaaaaaaaaaaaaaaaaaaaaatttactccctaggagatttcacctgcttatggctttggaactgagctgtataggtccagcaactcaaagcatccatggtcaattaggatcagcattaactcatacaactcagaagaatataaggtagaaatcagaatgccagtacaataacttgcaattagaattattactgtcaagttgattaaaattcctgtgtcttttagctagggcactcaggctgctgtgtcattgagatagatgagttaataatactaattaagactttgtgtattaggttataactttcctttttcaggatgttgaaattttactctaactttctaactccttgagactacatccttgttccctgccttgactgtgatcatatgtttgcacttaattccttctggaagtgcttccaaaactatccgtggtgaagacctaattcattttccttttctgatccatcatgaattagtactttgataaaatacaataaaaatgagttataaaaataaaattttaaaatgcacaatataagcacaatttcaattaatgacctccaaatgtcttattaaaaattttaagcctttactctcaatttcctttctttctttcttttttttcttttctttcttttcttttctttttttttttttttttgagatggagtcttactgtgtcacccaggctggagtgcagtggtgcaatctcagctcactgcaaccttcacctcctgggttcaagtgattctcctgcctcagcctccccaggtagctgggattacaggcacccaccaccatgaccggctaatttttgtatttttagtagagacaggtttcaccatgttggccaggctggtcttgaactcctaaactcaggtgatccacccacctcggcctcccaaagtgctgggcttacaggcgtgagccactgtgcccagtctttactctcaatttctaaactataattcacaagcagaatagctaatggagtgtttaattaatgctaacaaagttagggaaatagataataacatgaagctttattttgtatgtattgtgcgaacacactgtaatccattagggtccctgtataatcaatgcagtcagtacatttgtattcattaaatggaaatagagaacaagtttatggttttaaatggctatagatgtctatattaaatttatttaacatttaagatataaaatgtaggcagagatgttgatgtgtataaaatgtacttgaaaccaagtccttcctaaaacaataagccaactcccaaagcaatattgtttatacatgaaattatgatattatttatgtcattttgagggtaaaaatttgggtgaaatatgggaaatatttgatcaataatagtatcagaagatgcacagtcactgatttgttccacaatcatagataagtgttctgtggatacacaggagggatatttatttcatacacacaccctcaaatccctttgctctgataatgtttactcaatgagccacaatgatgacttctatcatgacaaccacttgtaagccctcttagtacagttttatttaatctattaaattaataaatttaccattaaacaaatacgtttttagctaatgcacgaaacagtgatttattcttcttctatcactgaaacttagtcacctgaatttcttacacatcactcagagtgactgaaatgttgttcttttctgggttttggtcctagtacttatttaatctgattttatttatttatttatttatttttggctctcaggccccagcatttccaatctgtaggaacttttattgcttccccatgttcagatgttttaagtaagactcaccaacatttcctacagtcttttgcatatttcagtctttaggcttgacttcctggataatacttaaacccccaattcacgagaaaaatcctatattcttagaggttagggagattttaccttagttcttagcacagccataacttttcttattatgtaatcccaatgccttgccttcttaatactgatattttggggatgagagagtctctatggcctggaaagatcatttcctagcatttctcagatgtacctttagtgctatatctggtgtccaactgggagtatccacccttagtaaagctgaaagcttgctttttcgtgtctacttatatgtaccctgcattaaaatatcatgctcacttatttttagacacattcttcatagagtgggaatgacattgtctctgccttacaggaaatgcagaccatctctttgtggaagactggccatataaatgtctattgcaaccatggcctcttttgaacttcattcctgtggtcgcctatctagaggttcatttggaaaattgaatttatcaccataatggtctcaatgccacatcaactgccatgtctaggtacacaattgccaataaaatagttttacacttaaacatttcctttagagggatgctccttcttgataatttgtgctatcctgaagcaaaaaataatcacacctatttataatgagcaaagttgcatctccactggcaaccccagtggatatggttctatcagacactatcagccatactttgcagatataatttcctagcttataaaaatatatctcagatggtcacatgagctccctctttatgcaaacttaactagtagagattcatattatagaaccactaccctcattactccttgtctagagaattcacaacatagtcagcttgtatatacttcacttgtatatttgatatcaaacataccaaataaagatataacccatgcaaaaacctttgacttgaccatgctttaaactccttatgtagaaggaccactattatgttcacaacaattaattgtcattttacaatgaaacaaaattataacaacattcactaatcatctaataagtgataaaaaaaactgttttactagctgtgggggaggtatacatatagttaagataatgtctcttctctaggaaatcataataaattgcaaaatatacataacactccaattgaaagagtgataataatcacataaggctttaatggagatacgcatgaagtgctatcagagcacagaggagagaattaattcttacttaggtgtagggatcaaggaaggctttgaagaaaatgataaatatgggctgaagctttggaattggttggactttgacaagttaataaggatgtaaagggatgggtggcctggtgtagtggcagggggtggtagggcaggcagtaatggagggagagtgcatttgagtaaaggggagaaacatccaatgcagtttcctatttgctgactgtcacacgtttttaactttgtagggaagatggaagaaaatctattgaaccaattgttttggctgttctgatgtgatcacagcattgcttatatggattgtcaaacaagggatgagctcataaaaggatattaatgtgtcgtttttattgagcaaagtagcattacagaaaaggtgatttcaaaggcacatggctctttcattacagccttcaggggcaatgtttgatcactgaaaacaggctgctttgttccagctttctctgatgtttggcattattctgaatacatatgctttgacttggatagaatcagtctgtaaagatttaatagattcgagatttgcttattcaaaatacatgttttatggttaaaatgaaatgaaagccattttaatatgtatgtctatatatacacagatatatttcagacacatatctcagcaatttttttaaaagcaattacacatattatgtgtttgttttgagataatgaaagttggatatttttaaaattcaccattttaacttatcaagaaggaaaaaatatattttaagacacattatattggtgataataaaatacaagatttccagttttagcgacttaagctttgctatatgtccctgtcacctatcatagacataactttctagctttctagtgctggacatctctgaacactttctttattaaaaatgagttaacagctttcttggttgaagaacattggaagtcacgaaatattaaagagaaattacaaaagattattatttacatgatagtcttttccttatgtgactgaaagaagtgagcttttttcttccaaaaggaaagacttgcttggaaaaagacctgaagagtcaaaagcttttcttgtggtgaccaagactcatgaaatttctttttatagaattctctggcttctattccatgtgaattgatatgaaatctcacataaatttatctttttattttgaattccaattgaacctttaaaagaaagatgacattccaactcagccaatttgatatacattacatttacaattagataatcagtgcactgaaattaagcccaacagacttcagctgaaatgggctacgttagattatgttccatttaatatgacaaagaaaaattttactatttgcttctttacttaaaagccttccctttccctctctccacttataacatcctctaactcaatgatgcccagtgctttctctgcttaacacattttcccctctatgttagttttgcaacaatttcaaacagagactatattgttatccatttgttgcctaggccaatgtttgcaaaccttaatgtccttataaatcatctagggatcttgttaaaaacacaggttctgattcagtaggtctggggtctaagattctaacaagctctcaggtgatgtggtggaccaaggtttgtatagcaaacacttagagtacaaatgacctgtccttaaatgtgtttttggaccatgataactggaaatgtagattctgtgactttgtggttgcttcatactttaaattgcttttttatttattgataatgaatcaataatgaatgctctgaaccatcaggactccctctacttccctagtctctgtttttaccacttcctccttcttacttacattttagacataacaaagtacttgaagtttccagaatgtatcaggctctttcacatctcagtgccttttcaaatactatttcctctgcctgtcctggtgtcctgtgactcttcctttaaaactcaaatctgcagtcatctcctccaggaatccttctctaatctctttttcatgtaattgcataattaaatgccttcagtatactcccacattgccctgtatttcctttattacacccttctcctaatctgttgcaattgtctgcttaattgttctttcccttcaagacaatgcttctggggggaatgaataatgcattttatctctgattcctattgccaatcgccaacatagtaggttttttttttttaatcaaagtttgctgaatgaatgaacaggggaagttgatgtgttgtagtcatacaagaaagtaatgcaatatttcttctcatgaagtttaaaattgaattgggagtcataaaaactgaaactcataaaaaattaagtatagggtgagataatactaaagatataaaatgttagtatgtgattaattgccaaatgaggatcatagcaaataaccattcagagtcaattgggggaaaaatgtcactgtggatttattagtatttttaatacctcaatttgttccacaaaggacttgagcctgctgataacattaagcattaaagttaacgaaaatatgagcacatatgtagttaagggaatagtatgagacaaggagagggttatggaaatatgtaccggaagcttgaggaatggatagactatccttaatatgtattctttagatgtattcttcttgtctgcaaaaatgcttcttgctcagataaggacagtaatgtgggtgtgctggattttcatacccactctgcctgggaagctgacttctgtggggacattagtagctcgcttgtcctctggcttctggcagaatttggctaatgggatgcctatggagaagagtgaggtcaggacatttattttctttggttgcctagaactggctgtgcctctttttaaagatggcccctatgataaacttcctgaaattattctaatttgagtgtgccctgttacctattgggactctgatatgacctcagagttgttgtttagagctagattggataccaggcttactaacttttctggcaaccatcaataccataaaaatgttctaggtgcatgctacatatcaggaacaattctatgaggaggtggttctacacagaaaaattcagaaaacaaacaagcaaacctaaaacgctgtgctcatatacttcacatgtagtatggcaaagacaacgtaaatcatcttggaagtcaggaaaaactgatatatataaaagctcacagctctataatgtttatttatacttgccttaagttagtgttgaattgtaaagcaataatatgccagagatatagtttttgggttgtttccttttcactgggggtagattatccagaatttttgcctctgctcttggctgttgttcatcttgtggttattttactcctcactgtccttccatcagggaatattaaaggaaaataagtgaatgaaaacttagctgtagcatctatgataaaaggtttgtcaagaagacgactgaaatactgactaaaatgaagcttttcagtttatctgggttggtctgccccctatcgccacaaagatactcagaatggtttctagcttgtcaaaaaccaagagataaaaatgggcaaaaagttttactttcatgctaatgaagagaaccagatctaataaataaatatgaccctcttaatgtgaagccctggtgtgcagaccctctttttcatctccaattgtatgacaaccttgtttgcagttgttatttagatcatttttgagtcatatgagcttaattttgtgacccagcaaaaacagatcataaatctcagtagtggaagatacgtttgtagtttgaccatggtaagatgagctgagggtgctgaggaaatcataaattcaatttacaaaaataacaaaaataagatttatttatatttggcccagtgaataaagtgaaaatctaatatttttctggtctatgctgtacattttgccaagcttgattaaattcctgtttagcaggtagctaagagaggaactgaattaaaacactttatattaagcttttgagtctactttgttcttcactgttttctttttaaaaagctgttttaacttttctttccttttaggctctatttatgaaatgtttggaaatgaatgctgtttttcaacaggagaagtgattaaaattactggtctcaaagttaagaagatcatagctgaaatttgtgagcagattgaaggttgtgagtctctacagccatttgaactgcctatgaattttccaggtacagcacattgcaaccacttatcatttgtacaactatattgttattaatatgtatatatacacaaccaaaaacaagaaaaaaatggtctgtttttcactctaggataatgggggggaaaatccggaattgttatagtttgatcattttaagaacgaatggaaagcaactattttctccttttttaaagtgaaagatgtttatcttgtacttaagaattaatctctttggttaacaaacatttagtgagttccaactatatacacaccactagttgtgctaaataatgagaaccaagaaatcaaagatatattttcataaattctgtagaactaagtaacatcatttaagcctatctaccctctttgctattcctactgtcattactctagctccttggatcaccgttgaccttgcctgtctaatattactgaaaagtcggcctggtcttttttatctaattgactctactcagccctccaaaactagctcaaatatcatgccatctagaagacttttgctgaccctctaacctaatctagatttctcttttatgttcccatagtatgttgggcctcataacatacacctcactggatagtcattgatgactttctcatttgccatattttttacactaggggttggcagactttttctataaagagccaaagagtaaatcttttaggttttgtggccagagggtctctgtcacacctatttcactatgctatttatgtggtagcacgaaagcagctctggataatacataaaccaatgagcatggctatggctcaataaaactttatttacaaaaacaggtgacaagcaggatttgactcatctactgtagtttgctgacctctgctgtagactaaaactccttgacataaaatatgaacatgtgactttgtatttctgataccaagcacaatttctggcacagagtgtgtgctcaggaattgttaactgaatgaatgaatgaatgaccagtggaagagaaaaatctcataaatcttaacaatatgatgtgtttcatggtttgatggaagtatacttgtgttctttgtggggcttgaaaaggaatatcagactatagttggttgtgtttcagaacagggattctgcagccattgtacttgaatcccagctctgccacttcttagctgaataactttgacaagttatttaccctcctttcatgtaaaatgggaataataatactgtctatctcctagtgttattgggagggctacgtattgaaatatatttagtgtttagaaaggtacatggcatatagaaaggtgcataaaaaagtgtcagcttttgttaccattattaagatattattactgtcattggaggagtcaggaaaagctttttagggaatgttttaattgggctgaggttggaagaatgaaaatatattagctatattgaagtgaggattttttcaagtgctctagtattcagtcccctttcaaatgaaactttccacattgttcaattctatttctttcttactcatcttttataacaatgattctcaaatttggctgcacattagaatcacttagggagctttaaaaaattctgatgttcaggccacttacatgagatattctgatttgtttgctctgtggcaaagtctggtcatcaaggtttcttaaagctcccagtgtgatactaatgagcagccagtgttgagaaccattactttataagatgcctctcttaagtactctaattagatgtaacaattccctttttaaatcactatagtttttcgtgccttaatcattgcatttatcacattttgcatgtaattgaggctatttgtgtacttgtctgactaccaccatctgtctaatagatcacaagtttgctgaggcagaatctgaatcttatttattacaataatccccatggtatttagaaaaagatgcacataataaatatttagtaagttaaaatgactagaatctttggtagaaggaatttttcttattagaatagtgaaaacacttagtttttggctaacagtttaatttggggagttgctatttagaatattcttttgaacttccaattagcatgataatcttgcatctattaagtgacaatttgaaaatgatgtttataaaacagttttattgtaaaggacagagtgaaaatggaaaggtaaagtgattggcactggtcagggtatagtttctttcttcaaagagaactcctagataatgatgaaagggatcccagatacagggataattcttctacatcagcactaaggagaaagatagaaatcaaagatactaatgttattcaaaaattttaatagcagcatctctttatttatactattttaaaactatttaagttcccaattagatttttgacttaaaaagtcaaatggtattttaaaacattcttcctcatttgtaaatttcccaaaatttccttttgctattgatttctaattttattctattatagtcagatgacatattttgtatgactcaatccttttaaatgtattgagacttgttttttttggactaatatatgatctagagaatgttctgtattcacttgagaagaatatattttctatttttgttgggtaagtgttctacagatgtctgttggtttatgtgtattgttcaagtcttctatttctttgtgtatcttctttctagttttagtcattgttgaaagtgaagtgttgatgtttccagctactattgttgaattgtttattttcccttcaattctgtcagcttttgcttcatgtatttgcaggctctgatggtaggggtatatgtatttgtaattgttatctcttgttgatggagtgacccttttatcattatataatattctttgactctagtagcaatttttgttttaaagtctattttgtctggtattagtatagtcactccagttttctttcagttaatatttgcaaggtctctcatcttttattcttttactttcaaactacagacagtccccgacgtatgatgacatgattataatttttcaactttaccatgatgcaaaagcaatatgcattccatagaaagcatacatcaaattttgaattttgcttttactaactgcaggctaatgtaagtgttctgagcacatttaaggtaggttgtgttttcaactcctttgggtaaataccaaggagtgtgattattggactgtatagtaagagtatgtttagtttaaagaaactgccaaactatattccaaagtagctgtacaattttgcattcccaaaaacaataaatgagagtttcttttgttccacatcctcaccagcattttgctttgtcaatattttggattttggacattttataagtagacgcctatggtatatcattgttttaatttgcaatgccctgatggcatgtattcaggatatgcttctcatatgcttgtttgctatcagtacatcttctttggtgaggtgtctgttcaagtcttttgctcatttttttaaaaattgagttcttgtttttcttgttatgttttaagaattctttacatatttggggtaacagtctttatcagatttgactcttgcaaatattttctcccattccgtggcctgtcttctcattcttttgagagattccaaggctgtctttgattttcaaccatttgatcatcacatgtctaggcatgaatctttgagtttagtctacttgaagtgtattaagtttcttgaatgtgtagattgtttttcatcaaattttgaaagtttttgccattttttaaaaatatattctttctatacctctctctctctgctctccttttaggaatcctattattcttatattcttatgctttaaggtgacccataggtctttgagactttgttcttttctttatactttttttcctctgcccctgaatgtataatctcaattgcattttcttcacatttgatttacgttatctatttggtaagatattattctcatacttttgttctagttatgtagacatgattttctttagttctttgtatatattttaaatagctaatttaagtttttcttctctagtaagtctgatatctgggctttcttagagacaggttatgttattattattattattatttccatagattcagggttacaagtagtttttgattacatggataagttctttagtggtgatttctgagattttagtgcacccaccaacaaagcagtgaacactctacccaatatgtagtcttttaatccctcacccccttccaaccttccccgctaagtccccaaattccatttatcactcttatgcctttgtgtcctcatagcttagctcctacttgtaagtgagaaaatatgatattttgtttttcattcctgagttattgcagttaaaataattgcatccaactccatccaagttgctgcaaaagacattatttcatttctttttacagatgagtaatattccatggtgtatatatactacattttttaatccatttgttggttgatggacagttaggtcagttccatatctttgcaattgtgaattgtgctgttataaacatgtgtatgcatgtgtctttttcatacaatgactttttttcctttgagtagatatgcagtaatggaattgccagattgttctacttttggttatttaaggactctccatactgttttccatagtggttgtactaatttatattctcaccagcagtctaaaagtgtttccttttcatgagatttatgccaacatctatcatctattgttttttgacttttttattatggctattctttcaggagtaaggtggtatctcattgtggttttaatttgcatttccctgattattagttatgttgggcatttttcatatgtttgttgttcatatgtgtatagtcttttgagaaatagctgttcatgtcatttgcccacttgttggtgggattattagttttcttcttgcttatttgtttgagttccttatagattctagatactagtccttggttggatgcatagtttgcaaatattttctcccactttgtgggttgtctgtttactctgctgcttatttcttttgctgtgtggaaactcttcagtttaattaggtcccatttatttatttttgtggcatttgcttttggtgtcttagtcatgaattatttgcctaagctcatttccagaataatttttctgatgttatcttccaaaactttatggtttcaggtcttatatatcaacctttgacccatcttgagttgatttttgtataacatgagaaatggggatcaagtttcattcttgtacatgtggcttgacagtttttctagcaccatttattgaatattatattgtttccctaatttacgtttttgtatgctttgttgatgatcacctgactgtaagtatgtggctttatttttgggttctgtattctgttccattggtctatgtgcatattttcatacaagtactatgttgttttggtgactatagccttgtagtataatttgaaattctgtgaagaaagtcattggtagcttgatggggatggcatctactttaaagttcatatggtaccaaaaaagagcccgcattgccaagtcaatcctaagccaaaagaacaaagctggaggcatcacgctacctgacttcaaactatactacaaggctacagtaaccaaaacagcatgggactggtaccaaaacagtgatatagaccaatggaacggaacagagccttcagaaataatgccgcatatctacaactatctgatctttgacaaacctgacaaaaacaagaaatggggaaaggattccctatttaataaatggtgctgggaaaactggctagccatatgtagaaagctgaaactggatcccttccttacaccttatacaaaaattaattcaagatggagtaaagacttaaatgttagacctaaaaccataaaaaccctagaagaaaacctaggcaatatcattcaggacataggcatgggcaaggacttcatgtctaaaacaacaaaagcaatggcaacaaaagccaaaattgacaaatgggatctaattaaactaaagagcttctgcacagcaaaagaaactaccatcagagtgaacagggaaccgacaaaatgggaggaaatttttgcaatctactcatctgacaaagggctaatatgcagaatctacgatgaattcaaacaaatttacaagaaaaaaacaaacaatcccatcaaaaagtgggcaagggatatgaacagacacttctcaaaagaagacatttatgcagtcaacagacatgtgaaaaaatgttcatcatcactggccatcagaggaatgcaaatcaaaaccacaatgagataccatctcacaccagttagaatggcgatcattaaaaagtcaggaaacaacaggggctggagaggatgtggagaaataggaacacttttacactgttggagggactgtaaactagttcaaccattgtggaagacagtgtggcgattcctcagggatctagaactagaaataccatttgacccagccatctcattactgggtatatacccaaaggattataaatcatgctgctataaagacatatgcacacgtatgtttattgcagcactattcacaagagcaaagagttggaaccaacccaaatgtccaacaatggtagactggattaagaaaatgtggcacatatacaccatggaatactatgcagctataaaaaatgatgagttcatgtcctttgtagggacatggatgaagctggaaaccatcattctcagcaaactatcacaaggacaaaaaaaccaaacaccgcatgttctcattcataggtgggaattgaacaatgagaacacatggacacaggaaggggaacatcacacacacaccggggcctgttgtggggtggggggaggggggagggatagcattaggagatatacctaatgttaaatgacgagttaatgggtgcagcacaccaacatggcacacgtgtacatatgtaaccaacctgcacattgtgcacatgtaccctaaaacttaaagtataataaaataataatgataataataataataataataataataatttgaaattgagtaacgtgatccctccagatctgttctttttggttagtattgctttggctctgtgggctctttttggttccataaaaattttaggattgctttttctaattctgtaaagaatgatgctggtattttgatgggaattgcattgaatccgtagattcctttgggcagtgtggtcattttcacaatattgactcttcccatctgtgagcatgggatgtgtttccatttgtttgtgttactgatgatttctttcagcagtgtgttttagtttttcttataaagttctttcacctccttggttaaaatataaggttggtttttgtttttgtttaggtttcttttgcagctattgtgaagggattgcgttcttgatttgattctcagtttggtcattgttgatttaaagcagtgctactgatttgtgtacattgattttgtaacctgagactttgctaaatttgtttatcagatctgggagctttttggatgagtctttaggtttttctagatgtacgatgatatcattggcaaatatcaacagtttgacttcctcttttccaatttggatgccctttatttctttctctggtctaattgctgtggctaggacttccagtactatgttaaagagaagtggtgaaagttggcatccttgtcttattccagttctcagtgggaatgctttcaacttttccccattcagtatgatgttggctgtgggtttgtcatatgtggcttttattactttgagctaagtcccttctatacctatttttttgagcgtttctatcataaagagatgctgaattttatcaaatgctttttccgcatctattgagacaattatgtgatttctgtttttaattctgtttatgtgatgtatcacatttatttacttgggttaaactatctctgcatccctgggatgaaactcatgtgataatgatgtattatctttttgatttgctattagatttagttagctaatatttagttgaggatttttgcaactatattcagggatttttgtctgtagctttctttttttttgttaaggcctttcctggtttgggtgttaggatgatactggctacacagaatgtttagggaggattctatgtttctctatttttttggaatagtttcagtaggattggttgtaattcttcttggaatgtctagtagaattcagctgtgaatctatctggccctgggctttttttggttggcaatttttaaattactggttcaatctcactgcttgttattggtctgctcatggtttccatttctttgtgatttaatctaggaggattgtatgcttccaggtatttatccaattcctctagattttctagtttgttcacataaaggtgttcatagcagttttgaatgatattttgtatttatgtggtattggttgtaatatctccaatttcatttctaattgagcttatttaaatcttctctctttttttcttggtgaatctcactctgcaggaacagcttctattgattgcttgccctctcccactgtgtacaggtcatactttcttgttcctttgccttctcataatttttgtttgaaactggatgttttaaatgctataatgtggcaattgtataatcaaattgtttcctttttccagggcttgctgttattggtagttgtttgtttagtgaattttctgaactaaatctgtaaagtctgcattctccatcatgtgtggccacagaagtccctgcttagttagcttagtggacaactgatgtctgaacagagatttacttacacagttgaaaccatgttttcagtatgtgttgaagggctctgttgttcatttgggaacattctgtcaacactcagtcaggtaattgaaaattctagcttagccttgaatttgggctcaggtagagcctcagttagccagaattgagaggtgagggcttttgtgggtctttcttgcgtatgcaaacagtcctgggcatgtgtttaaaattactcatgtgactttctggattcttaggaatatgttggaacttttcaattttttttatggaaatctcatttcccagctattctttttaagtttttgggttagcctattattttttttcccatcactgcaggtagccacaaaagttaaacaattttcttttattatttttggcaagtgctctgagaaaagcctttccccaataatgagttcaaaatgagatcaaagagacaaccatgcaagtgtgatcttccagagagccaccagatatgtcaaataataacaattctctgggattgagctttgaagatacttcaacctcttactgctttctcctatgactgtcaagttgattattttttcgtgattacaggttgttagttttcaaggttactgtggacctgagtgtcggggaggagagaatgggaatacaagttaaagtgccacaaagtttgctgttcttaccaagattcagccatttttcttcaataaatgcttcccaggttgctccaattatttggttaatttttcgacttttgaaaaaaattgacctgctcttctgtattaaagtatgtaaactcatatatcctcaaatttatccaataatttaaaagtattgaagatgacaataccttggcaagagtgcccagaattacttctttgtaaataaagaaaatctactgaggaaagatacccagcctttgaccaataaacatagctttgtagatgcagcttcagcaaatgcaagctcaagaaaaagtcaagagggtaaagatttgcagagtttgacaagcacactttcaggggatatactggagccttttttttttttactaaaatttgaatggggatctgaactccaaatatatgcaccactggtttcatcctatattaatattttatttccatatgtctcttttgacacctcaaaaatgttcaattattttaaaagaaataataagcaatcatttcagtaatgaatgaaacaaaacatactgcttttagaaaacactctttctagctgaagtattttatgagctagaaaacatgccaatcttgccaaaagcaacaaaaatatatcctattcggtagttgattacattatctccatagattggtaaatcatgtcatgtgtggtttatagtgaagttccaaatttctggattacctcctggaaagatttgtccctctttcagagtgttatggagcatgaataataaacatattctcttagtcatgagaaatagcctgagagtgtttcaataccatttttatgaagaacatagatttttttttttcccaaacagcaagttcacattttctccaaatgatatggtgaaggaagactgtagttgcatctataaaaccacccttaaaattataaggccagataaagacatttttctgttttaatatttagactatactctatgaattttgttgctgtataggaattttgtttcgggaggtagcagacatgaaggaaatgtttgagatggaacatcctctactaccctttaccctatcctgtccataacacacactcaaatgaagataccaaagatgtaccagacattgttcttaatatttttacatataaaacttttctaaacacttttatgtatatataaattactaattgaattcagactttacagatgagaaaacagaatcaccaagtaatttgccccaaatcacatagcaagtggttacgctgagtctgccctagcactgtccaataaaaatataatatgaacctcatatgtgatttcaaatgttcaatatccacatttactacttacatatatctgcatagtaagttgtgtctaaatttggcaacttaaaacaacatttctcacataatttatgaggttgaggaatcgggagtgctttagatgctatagttctgcctcagggtctttcatggagttgcagtgaagccgtaggcagggaatggagtctctgaagatttgactgtgatttggagatctattatcaagttcattcacatggctgttctgggaggcttcaattctttaccacatggtcctctccatagggttctcactgacttagtggtctgagagtggaaacaagcccaagactgaaaccagtcttctatggcctaatctcagaagtgacataccatcacttctaccatacccttttgatcacacagatcaatgctagtgcaatctgggagggcactgaacaagggtgtgactaccaggagggagaaataactgggcaccatcttggaggctacctagcacagatatctttctttaaaaattaaagaaaggtgacattaattttaatatgttttatttaaaatgtgtgtctaggatattatactttcaacaacttattgatataaaattatcgaaatattttacatcttttcatgctaaccctttaaaatctgatatatattttccacttatagtacatctcaatttagactgtccaaattcaagtagccacatttcaagtgctcagcacaatggctacgttaatggtacagtattggaaataacagatatgaacagtatgtataggtccagatttgtgttctgaagcacttcttgcttaatcatagaaaaaaaaaaagaggtgatatttttgtcaatcaacgttaatgccataataaggaatttttctactatatgcagtagcattgtaatgttaaaaagatttgaactaatatcactcctagaacaagaggaaacagaaatttttagatgaatgttagaaaatttactaaattcactaaatagaaaatttatttcatatgtttcatagatttaaaccatgtattaaaaacaagctttgggacgtgcttcctacttaaattaatttctaccagataaaaggatttcatctatcaagttgtcaggaaactcttaagtagccaggaagctactagggtgataccacccttccatgaattacatcactaaggagacagtgagcccgagttgcacagcaggcaggataaacttcatgtctcagaggttgtctttgacccccaagacccccaaagtgacacagggggttgctgaacacataattggggaaccctgagcttacaaaccccaaataaggggttgctggcgaactgccaacttttgccctccaagaaaaattatatttattaccttggaatgtaaaataattcctttgaggtgaggagaaagacttttctatcctagaatgtctctggggagggagacattctcttatcatttttatactagttgaaaagaaacctgctacctctagctcccaaggcgtatagaaatgctacggagaattctcttccaacatgactatatcccttaagccgtaagacttaaaaaaatcatttttattggacatgtgaaaaattcagaaaagtattaaaataactgatgacagaaattgaattaatagaattgtttctgtaagaaattaattaaggctaaatggctaaaatttataaaatctgctcctttatgcctgggtaccaaatatgtgatacattaacattgttaattctaacacattaacaatgaccattgtttcatttggagaattatatactccattaacagaaaatatgtattacattcaatcgtcattcattgtattttcatctactattgaaatgatcaatctttcatctttattttattattgtagctgatttttttatttgattaaaatataagtttctaaaggacctgataggaaaattattatgcaaaaaatatatacatttgctagctttaaataacctttccatcttctgttttttagggacttttgttaaaagaagcaaggaatgtaagtcagaagttgctactgtttttccatctggatgttatgataaaacatgactcagagcagccctaaatagagctcctgccttttagataattcgctatccaaggaatcaggggctatttttccaaattttctgggtcaacttctcttaaggtactatttcccactgtgctcacttaagcaaagtaaactcagctgtgtctaccttacaacatcttttctttgacaaaaaggggtattttgtataaactatgcaagaaaatgtgaattaatcagcatgcaaaagaaattcaggcttttaaaataattttaagatctatttcttggtctattttttttttctcttgctttttagttcatgatcagattatttctctgcatccttggtctttggataactaccatgtatattagccaaaagacaaacagcttttgcagttctaggttaaaatgattctgttactcatctatgtgcattgtaatatcagatcagaattctgtcagaaagatcattttaaaggaggctgttccacagctggtgctgttctataagttttcttggtattaatgttttatctccatcttctaaaatctatctcatcactcattgtccttaccatccgtctttcttaccggcacaattctaaaagctttttatgatgctaccttaacagtaccagcagggaaggattctcatgagaggaactagattgcccttaaacaattggatcttctgtttcttgcatcttaactgaacgttggtagagaacatttctataattatacacagttacattttggggatttagaggttttgccactggaatgcaagcagagtttccctatacttcctgacccccaacatgccatatatggcagcctcccccaccatcaatgtacaacactagagtggtacatttgttgcaagtagtgaaccttcattgacacatcatcttcactcaaagttcacagtttatatttgggttcatttttggtgttgtacattctatgggttttgataaatgtagaatgacacatatccactttgatagtgtcatacaaaatagtttcaccaccctaaaaatcctttgtgctccgcctactcattcccctctctcctctaatccgtggtaaccactgatccttttcctgtctccatattttgcctttttcagagcgtcatatagttggaatcatatagtatgtagcctttaaagattgacttctttcacctactaatacatatttaaggttcttacatggcttttcatgatgtaataagtcatttatttttagtgctgagtaatatttcattgtctggatgtaccacagtttatccattcacctactgaagggcatagttattacttccaagccttggcaattacgaataaggctgctataaacattcatgtgcaggattttgtgtgaagataaagaacccgagtttttaaagctataagatgtatttatttttctgttttacaagtaacacatgcatgttgtagaaaattagaaaatgggagaaaattcaggaaagtaaataaaactcactataatatcatcaccagactcatctagcattaatattagatacatttgtttctgttgttttccagtacattgtacacatgcatacatatagacacatgttttagcataatgggaaaaaatcttattctgaggacttgcctgtgtcattaaatattcttcaaggcataatttttattttctaggtaatagtccctcacatgcatattccataatgtattcaatccatcctgaacatggccatttatacaatttgtactgtgatgaacagccttttaaactaacattttgtctgcatttctgattattataataatcttatatacatagaagtaaaaatgtttttaaagatctgatacatattgtcaatcacatttcataaaggctctgctaatttgcattccaactaggaacttttgagggggccaatctaactgcttttttgagggtgtgacttaactgtttgtctttcccatctcatttttttgagttaatagcattataacaatttccacataacaacattcacctgattaaaatatacaatttaatggcttttagtgtccctgtctccatttttttagaaacatgaaattttaaatcttcaacatccttgaaaatggcagggcctgacagacctggcagagggtcacactgtcaacgatgccctgtagtcaggtaggggaaccaagatgtgcagtgcttaggtgagtcatgcaagggaagagttgttcttataagggtgtttgttttgacctatttaacttctttctagaattgcgagtaagtaaatatggccagaaattaatgaattaaaagacttttagaaatgagttgttaattggctgggcatagtggctcatgcctgtaatcccagctctttgaaaggcttaggtgggaggatggcatgaacccaggagttcgaggccgcagtgatctgtgactccaccactacactccagcctgggtgaaagcaagactccatctcaaacaaattgaaaattaaaaaaagaggtggtaatcattatttgcaaatagtaacattaccctgtaaaacagagtatcaaatgagacaaaatattgaaacttggtaagatgacaagatgaacaaatatgtaaaacaactgtatgtacataaaggaatatattcttacatataagaatacatatagttataattttccatttataaacacttagaatatataggggtaacatattttataactaactcatttatttacttaaaaagtattatacaagtttacttatttattaaaaaatagacgtgcttgaatcagaaaactgaatattataaatatatcaattacatatgaattaatttatgttcaacataatgcagaataaaatttccatattataatcataattattactatgttgcctcttgagagagtaattgtaaaaatcacttgggagaataaacaagtgaacatattcaagcaaatattttaaaaataggataatgagggagtacttgtcctgccaacattaatgtctgatacaaagttataataaatggtactatatgttgcttacagaaaatcaaaaactgcatcaataaattacttttacaatagtggtactagttgttatagaagcgtcacagcaatgtttttaatttgactctagtgccatgcacttaagcatttgtttatagctcagaaacagactttaatgcagagtattatttgctgtttgataaagtttttactgcacatctgggtttaaaggaagaattatttagtaaattgttctagtatagttaataatgtagcaaacagtagatcaaattggatcatcaacattataccatagcaaaagaaatttgaaatagatgaaaacatcacattttaaggaaaactatcttatgtctatatttgaaacaactttcaagttgcaaatataatagaaaaccataaggaaacaatatatttgaatacataaaatgaaactttctgtcataaagtaaaaaaatgaggaagaaatgtttaatagcaaaggaagataactcaatttttaaaagactaaatgtcactgaaatggaaaacagaaaaatcaataaatattctagtagaacactaataggaaaatggacaaagcttagaagaaattcaaatggtttataattgtgtagaaattagtttgtactaacacaataacaacttttccacctatataggtatctaagcttttgcatttatgaagttgggaaaaatattgtcaaagggtcactcttaaacctaactgaggagtgtatccttcctgaaaataaattttgtaatagattgagtagcttctttgaaaatacatgtaatatattttgaattccatctacatcttatgcatgtacagagataattattgatgacacaggtacatttagtcttggttctgccatcctggaaccagtactgtgctgagaaaagagcctttataatgtttaaagctttaactcagtgcttccacttgtcgaatcaactccaaagaaataatcattttagaattatttgtaataggaaaataatagaatcaacttaaatgcccaacagtgaggaatcgggtaaatcatgatacattccttacaacatattattcatctattaacaactatatttgtgaaaaatattgtaaagcatgaggtttattcggttcagtattaaatgagacaagtaggagtcaaatgaagtgtctatagtagagtttcgacattgtttaaaacatttttatctctctgtatatatatcaagttaaaaaatgtcagaattttaaaagcagctgtttcagtccagtgagaatgagtgattttaattttattttaaatttgttaaaatttttttgagaatatatatagatatatatatatgcatacatatatacacatactacacacacatgcacacagaaacacaaacacacaaatagaaatttaggctgggttccttggtgtgttttagtgctttgatttaacaatttcctcatatataaagtagagaaaacattaatagcatttatcttacaaaattcttcagaggatcaaataaattaaatgaggagattagcttacgacagaccatggcacataacatgtactcaacaacagtgttaatattgtttttctcattattattatcttttaaaaattttgggggggctcctctgtttcatgagccccagcatgggtaggccttgaattttctcattgcagctctattcttcctattatgaggtaacttccttctggctttttgcagtagttggtctattattcttagtttttgatgatatggtaagttttcatcgttttctatcattttctgtgtctttttgtgtatactttatattggaaggtcagggacggccatatccagggctgccagacagccagcatttaaactcctcttaatcaaacacaaaccttggaaaaccccaatttgtttatcttcagtgtctaaagtgatcaacaatagcagctccaaatgctgtgctctttcctggaagtgactgtctgggtcaatctctgaatagttttgaggcagttccataggagttacttgcacgagaccccccagtgctctgaagaaattcatctcagagctgttcaggtgttcgtgctgaccaggtaccaggtcaaagcttccagagaggaccgtcaggggccagtaagctcctgtccaagtcaaatccactgggagagttgtgggttagccagttcatgagcccagtgctgattttaggcaggattttcaaattcatgctgttgaagttagttttattgcctagtaatatggaaccaaaagaatgtgtttagagagaaaatgctcctttttatatactggtgaatttagaaaaacaaaaattcagttttctttattgtgcaaatcaaaatctatttaaatcctaagccctgacattcatttaatacttatggttacattgggaaattatagctctttctaatttgaatttaatgtaaactgatttttaattgttttgtataaccatgggtaacagatttttttgaacactgcatgataaaaatcagcaaatatgtcagacaaagcacaatgttacaaggaaacaccacagcatatgttgacagttatagaagaattgctgctgttttcacccttcacaccagaataatttcttcaatatttacctcccatgtgtagagagagaaacatatggggctttacataatcataagcataaacaggtggctacttaggtacatttaatttgcaggcaacatcaatactgaacaacacaatcagctccacatggctcccaaactctttctactaacattccattaacaaaattaagatcattaaaatagagggagggtatagtcctccctcaactggcttcagctacctttcagagtcatgaataaaacactttttcaaaaatgccttggcattttgctgttttctttgttcaagggaacttcagtaactgtgtataatgtataccttgtgaataacaacgagcagcataatatttgcatttaaaatgtgcttacatcttttattctccctctaatctgctcattatgggcataaaattatgatggttaaattctaagtaatttatcaaagcatggggtcggacaagctcctcaaagcaacctggaaatatttctccaaaggcagtccacctaaagaggtcacctgaggctcatttccatattcaaacatgctggtgaaatctgtggaaattatcattcctggaaatttttgctcaatctgtgccagatgctgagctgtagattccatatattttgttatctcgattttgatccaggctagaatatctaatttgtcctcgttggcattgaaattacataggtaccaatttttctgaccttataaccatcctacaatggcttagaatcccagggtaaaggcaaatgaggagacttaataaccactatgtttttaatcatttggtgcttactagctgttaagtactacctaatcatgttacctgtattagcttatttaatcaccacaatgactttatgtggtagatgatataatttttctcattttatgaaaaatgaaattgtagccctgagactttaaattctgaagtatacatgttaaggaaggggctgaggccagaattaaaacccaggctaataggaattgtcaagccataatcttaaccaccccactctagttgtgttccctttatcctgaaagttctactgcccaaaatcacctagggcctgggaatcctgaaaattctacctaaaatcacctagggctaggaacagcaaatatgtggtattgtgaagatcctcttaacaatgctttgtgagaggtttgggggtgcctaaggtctgtggaggttctttctagccctgatacctctatgtgtcttctcaaaacacaaggaacagtgctctgcagaactaatgagcatctagggagctgtgttgccatcaaggttatgaaaataacaatttctcacattctctctcctcatcgtaggtctattactcactctcgctgcctgggagagagaaagttttaacatgaacaagtgtatgtatgacgtgcggcacatttattaataagctgtgactacaataaagctttaggcctagatatcagattatatcatttgatcttaagagctaacattattaatatgtaatttgttaagcatcccaaatgtgttaggttttgcagtcactcctttcaaggagtttaaatgttactgggaaagtttatttgttttccccatgcaatggttgaaccaaagaggtaaaaatgaattgaaagattttatgatatattcttttacctctgcaggtaaaagcaatatgaaaaactattaatagctactgcagacagtttcaattcaattattattattattactattattgttttgtgatggagtctcactctgttgcccaggctggagtgcagtgacatgttctttgctcactacaaccttcatctcctaggttcaagcgattctcctacctcagccttcttagcagctgggactacaggcacgcaccaccacgcccagcttttttttttttttttttttgtatttttagtggagacggggtttcatcatgttggccaggctggccttgaactcctgacctcaaatgatttgtccccgcttggcctcccaaagtactgggattacaggcgtgactcaccacgcctggccccaaatcaattattaatgtaaagacatttgaacacaggcattctatagtctcacttagtttccctcaacattttaagaaacttcctcaccatcttagacatatgttctgccctcccaaatactcagttaaattactgtgtatcatttctttatcacacactttaacttcccccacattgcttatttctgctcttgaagactcttctttgaagattgttggagtcactcattagttgatgatgttcagtgatctataattgacaccaaaatctggagactcttctcagttcagactattattattttatattccaatactttgaggattttgaactttttgctttgatagatttatagaatataccaacttaaacatccttgttattatatatttgtcatatatatttctcatttcacatgtttcttgtggcttttctatcactgtgttacattcccaagacaaattttaggttggtatattctacaaatgtatattttttaagactaccccaaatccagtgtttccattagaagttctagctcaagtatctctattcatctttagattgaaatggtgtgcatgaaataacctatcaaagccttcaaagtaggaccagagattattattgttcttctcacaccatggcatctggggaaggctgatccatgtaaagagagggctggctggtgagacccataaacatgttattctcatgagcaatgtccttgtaagtcatacatgcaacagggaggcaagactggcttggtggcaggatgcaaaccttggatgtcaaagctcagattgagattccagagctatgactaccagttgtaaaaattgtaactattttcatatccccctatagtaataatatttctttcattgtcctcaaaagattattgtaaggataaaggatgcatatgaaaaagttttcaaacttgtaaatttctaaacaaatttcagttgttgcaattactgttaataacaactgcaaatcattaagaatgggttaaaaatataaactcactcaaaacctaagattcaaggaaaagacttgaaagactacattcatttattaattaatttttagcaggtcaatctattacatttcccatgatttatgttagttaagtgacgtgttttttttaatgaacaatgtctcctaattcaaaaataacaataaaatttattttgagaactaacaggccaggtgtgatggctcacacctgtaatcccagcactttgggaggctgaggcgggcagatcacctgaggtcaggagttcaagaccagcttggccaacatggcgaaaccctgtctctattaaaaatacaaaaattaactgagtatggtggtgcacacctgtaatcccagctactcaggaggctgaggcaggagaatcacttgaacctgggagtcggagtttgcagtgagccgaaattgtaccactgcactccagcctgggagacagagcaagactccatctcaaaaaaaaaaaaaaaaaaaaaaagatctgacaatcctaggtggaaatagacatctattttcatgtgttaacttgttttataaaggttgcatattggcttattttaataacttgattactcaagtcttggaatgtgtcttgtctttctttggaagaataacaaagcatatttttcccagtataaaacgattgtacactttgagaaaaagatgaaaaaaaagttggtcacatttagatctaatcagtcccagtggtgctttagtttatatttaactttcttcattgtgaaactgaaattccaatatggcatcatattaaaacaacaactacaacatgtcctagtttttatggctttcaatggctgtttttaaaaaggaatgatttggattggctgcaatagtatatgaagagataagttaatcaaatatttttcctatattgtgccactttagtatgctaaactgtgtacttcatcatcttttaaggaaaagcacagattcacagacacatttttcttgcaatagagacatccagcaagacagctctgaatagtgtgattaactgaaataatgatgacctttagggttttagccttttcctacttcataatattttaggtctgttattaccttaggtgagctctattccccaagaaagatgacaccaaattaattcttctgtgacttatgtcatcgatatagctaggataaaaataaaactatgtgtctctaccttttatgagattttaggtacgcattttttaaaaacttatttcacaataactgctgaattttctataccctcataatgattgtggactcttagaaataaatcttcacacacagacaaatgagattaaacacacacaggcacgcgcacacacacacaaattcatttactgtggtgaattcaagaacactattttattgaactctccctgatacaggatataataaaatgagaaatcccttcaaagtaaatgtgtctttcccttattttagtcaagcacagcatacagtgagtgaacactattctatttctaaaagtttttaggataggttgcatttgctaccttgctcattcctgccaagattgcatcagtcacagtttttcaggaagtttatatctaaaaatcaccaaaattccttttgtttgtatgagtaaaaatgacttcaaaaataactgattaaaataatctttgaacagtaaccaaaaatatacaaaaatgacactataattggctaaaaatgatttgatatatagatgaatttcactggaatacacttgttgacaaaataataaatgactttttgaagctatataattttactaagtttttaaaaatacactatcttcttagagcatgctagtatataatattattaattacttttgggttaagaaagcaattaactaatttcttctttgtcctcattttctctggaatttattaaaatctattcagtaaatgcatttctgaaagtgatacaaagcagttgctcccataaaataaaaataaaataaatcaaacagaaccacttagacatacaatgtacaaaaatctgtatcttaagtagtaaaattttattgtagtagttggttatcttgatggagacaacatttcaaatactgaaattagtgaaatagatatcaatgaaatagtaaaaatagtgcagttttctaatggaaaaattagagaagtaatgagagaaaatgagaagaacaattgacatatagtcaagagcagtcagtccagaacaactacagaacctggtattttcaaggagggttatgtgatatattatgttgtgatttattaatgtgtgttttccacaagggttttataatcaaagaaatttggtaaattctgcatctcatattcttctcttgagagtcatggtgtatttaaagtttctgagaagtcttacattatttggacctatgcacatactttttcactgtggtaaaatacacataaaattaactttaccattttaaagtgtacagttcagtggctttaagtacatttggaatattgtgcaaccatcactgctatctatctagtccaagctatatagcttttattttttattttttattttttatttttttttgagagacagagtctcactctgttgcccaggctggagtgcagtggagtgatcgtggctcactacaacctctacctcctgagctcaatcaatcctgtcacctcagcctcccaagtagctgggactgaaggtgcacgccaatatacccagctaatttttgtattctttgtgtagatggggttttgccacattgccaaagttggtctcaaactcctggcctcaagtgaccctcccacctcagcctcccaaagttctgggattgcaggcccagctatatagcttttaatcatgaatgtgactacaaatcagttccctttgggaatatcttttaattttagtgtgtctagagaatatattcataaaaaagctgaccaaatccaatcttctcattttaaaaataaaaaatttaaaatgtgactgagaagtaagatgccttgcttgggatcacaaagtagttggaacagagccagtgtcatccagatttcccatttccaagaacagtttcttttctatttcaaggtattttccccttgtctccatttgtattgtctggtcttatgatctagtgatctataagcaatacttcataattttacctagaagaactctggattaaaataagcatctctaatctttaaaaagatatcactttaaaaatgtatgcagtacttgtgttgtaactctctccttgtgattttcttgtgagaactttcattgtaagaactctctttttaattcacgtaattctgttcttaggtctttttaagattgtggctgataaaactccataccttactatggaagaaatcacaaggaccattcatattggaccaagtagactagggcatccttgcttctatcatcagaaggatataaaactagagaacctcatcataaagcagggtgagcaaatcatgctcaactcagttgaagagattgatggagaaataatggtgagctgtgcagtagcaaggaatcatcaaactcactcatttaatttgcctttgtcacaagaaggagaattctacgagtgtgaagatgaacgtatttacactctaaaggagattgttgaatggaagattcctaagaacagaacaagaactgtaaaccttacagatttttcaaataagtgggactcaacgaatccatttcctaaagacttttatggtaccctgattctcaagcctgtttatgaaattcaaggtgtgatgaaatgtgagtatccactgagaatgatgttctatgagcatgagcattatggggtttgggaaagaaagattttagagcctgaagaatgggagtctgtctttatttcaactattgagcctgtgagagttagattcctcatcaatcaataagcaaaccatatatttgctcaaaagatcatattgaataatgaatatacaagtatgttgtaaattgtatggtgctattcacatatgaggtgctataactatcaggaacagacagatcaaactactaatttatttttattactgccagttaaatatgactagaaaagagctacttttaaaaaatagaacatatttagttagaatgaggctttcttgtatggaggtggtcaacaaaagaggtaaatatgcaaagtttccttgatgcatcccttacttctatttttctgacagtctttttctttttccagccatccattattggctgtaaatctctactaacccagagcccctctgtcttaagggaaaattatatgacaaattaattcacacataggcgtggtgtttttgtttgtttgtttttttgttttgagacagagtcttgctctgttgccaggctggagtgcagtgattctcctgcctcagcctcccaagtagctgggactacaggcacccgccaccatgttcagctaatttttttgtacttttagtagagacagggtttcaccatgttggccaggatggtctcgatctcttgacctcgtgatcggcccacgtcacctcccaaagtgctgggattacaggtgtgagccatcgcgcccggcccggcgtgttttaatatgcaatcttcatagaattatttgcattttgaaatacgaatatctggagagagcattgttacttcaaaggtgttaataccttgaattttcaggattatgacacgtgagtaggatggatagtaaagagttctgaacttggagtcctagattctaactctgggtcaataacttaataggtgttggttttcagtgcaccatttaaactccctgtttatgcaaagaaaatgatgatactcttttgcctaccttttcaagtagttttgagtttttagtattacaaaaaattgaggcaatggcaaattgtagaccccacattaatgtctgttagcgatccccaaatgtgcagttgagatgagtaattgagatttctttgatttttataaataatagatagtattttctcattttaaaatttgttattttctacaactattggcatctcctgcctatcgcatagttacaaatgagggtaaacccagaacctaagcacatggataaagtggttacaacatttaataaattaggaagcaagaaaaactactccgaggaaatggcatttaaatggaaggctcaaaggatgcataggaggtaatcaggcaaagaagaaaggaacaaggttggagaaggcaggagtggtattggggaagcaggtgaggaagggatgggagctctagtgtagttggtgtgagaaaaaaacggagagggcaggttgaaacaaatatgaacacatgcaatggggagtggaatcaatcatggagggtcttgaagtatatactaagaggctaaaatgtgtcataagggcaaatcagtaaagtgctttaagcagggagagaagaacagaggagagtagtgaggccagctgagtgccagggtacaggaaatttatacagtagagacatcaatgggaaagacagagaatcatagttgggcttgatgggtatttaagaagtacagagagcaaaatgtgaagatctattggaaggggaaaaaagccaaacttgttcccagcctcctggcttgatctactggatggaagtgcagtctattgaatgtaatcatcatcagatcaggggatattaacatatttgtttaggtaggacttaactgtgaatttatgttaaccaagaccgagaagaaagcccttggttgaaataataccgtttacaaaatgttttagtctaattcccattctttaatgctatttaaattaaattcccattttaattatactggatcgttaatttcatagggattattttaaacatagttcttattgtatagcaatttcaggacagatactgcctgagactggattgcatgtgtattgactgcagaatattccttggaaatagaggaggggtgtcttatcacaaatacctaatttaaagtatttgtattgttgtaggcatttttgccctgcatataaaatgtagaccatgttttgaatccattgtggttgttttacatgattctttcttaaattgaagattcaaaattgccttgacgtcaagaaaaagagtaggtctgagcagggaattggaagttttctagaaaccttaggggaaagagcaagatgaaaaatactgagaactacagggagccatgtttgctgaaaagagaacataacaaataaatagagataagagagaatataagatattctactcctattactagtttttaattattaatgtgaatatttgggcttcaaaaaaaaaataaaaatgtttaaatgaagtatttgtttctggaaacttggccaaaatctctgtcataggtctgaaccccccaaccctcatcacacatttaatgatttagaaaaaattatccctctttggaaaatagatacacataacagtgcaaacttcaaactactagtcttatgtaagtcacatcatgatgtgtattgtgcctttctcaggaagacaaaattcatattagcatagtaaatggaatacataatatttgcaaatgaaaaaattgagtgagctatttatatttgcctctgaaagagagaggtcttgaccattaaaacttttaaaatagtgtcatgttttgacatatagattgataattatttcttccctgagtgaaaatttcagagttgtataactctctttcttttttgaaaaaatctcaatgcctctcaaatttgggaggtatggttttagcccagatatgtaaaaaattaattcattttataagcaaagggctgaaatcacacaagtgaaaagtagtatcagaacagttgtatctgcatattgtataatcagtgatacatgaatagcagaaaaataacactttggtctttagaatactgagacttcctctttctctcatttaatttttaaaaataattttaatgtttatcaaagtccaaaaagtcaaatagtgaaaagaattataacaatgttatcagcaaacctttatgcccttgacacgagggccaaattttcctcatattctgctcttctgaggtaatgcctttaaatatttttcccctactttctggcacatatctaaataataaaggaatattgctctttttcaagtcatcaactttaagatagtaactattgactttcacatatgacaatgaagacttaattctcttatattcctacttccccttccctatattctcagtatattataagttatggctaagcattaatattttcattattgtgacaattcactgctcaaccaagtggtgtataacgagtataattccatttctccataactgtttttctgcgatgacgaccttatcgttttctttgcttgattttcttcaattttatcctaagtcttagagcattcttcaactctataaaaaaaggccactcagtgtaatttttcaaagaacccaaactatcaggaaggctaccttttctattaatttattttcctgaatgtattcctttgtaactcttcgttctcatgttccaattggaattgcttatttttgagaccaactgcataggtgctgccctgggaattccatttaaaataatcctggtgattccctgttgacttgtgtctgtgttgactagctatttctgaaatcaaataactccctctatcttgactttcttccaatttttatgcaggccaaccttcccttgcttcctgagaacggtgcatgaatgtttgaaaaatattctatacacatataagattgatagtttggctacttacagaattccaggttgagaataaattcccctcagaattttgaaaactttactcccttatcttccaccatcctgtatcgtcttggagagattatacgtggtattctgaagtttcacagtaatgtgacttggggtgggtctgttctttcttagtgatgacagttttcaatctgaatatttaggtgcttcatatttggaacaatttctctgataatgtccactcaattatattttctcttctctctgtctttaatttcaaatctcatactgaaattcccatactgatcttctagggccttttttcttttctattttatatctttttgtcttttgtttacctccagggaaaattttcataactacatttccaactgttttaatgaatttttaattttcgttatcatatttttaatttccaagagttatttcttacatcattttacatattttacactgttcttgtttttaaaatacatcttatttctctgagaatatttcagttagttttgtttgtttgtttgtttgtttgtttgtttgttttgagacggagtctccctctgtcgcccaggctggagtgcagtggcgcaatctccgctcactgcaagctccgcctcctgggttcacgccattctcctgcctcagcctgtcaagtagctgggactacaggcgcctgccacccggtggctcacgcctgcaatcccagcactttggggggccgaggcgggcggatcacgaggtcaggagatcgagaccatcctgactaacacggtgaaaccccgtctctctcaaaaatattttagatagtttttttaagttttcaagcgttcactgcaaaatatcttcctcttttggggttcttttttttttaagttttggtgtatcatttcttattaaatgtttttatcaaatgctttgtgattacttgtaatatgttcatatttacaggggtcagttgaaacaaaaatgtacaagtaaggcactgtttctatataagctctgtgtttatgaattttagatattatcctgccaactttttcactgcagcattcctcaaatttaggttttgtgagtctttcctttttgagttcagtttcacctaagaagaatctttgtggtatcttctggggattatgaaactattggagctacgtggggacagagctaaagatctcaccactcccacttacagatttataattaactccttcactttcagttccacgcttccctcctgctcacctatgtctggtttcggaggttctgagatcctgtatatactgtttcctgcagagggagaggtggaagaagtggtcacctatctcccctagattagagtggagacctgggtttaaccattcttcagacatttgaataatccctgtgtttttagcctcctggcttcaccttgctttccaggggtcttatgtctccaaattctatctttggaggtcttatgggacaacaacagttcatttttctttggattttgcctcctcaggcacataggcactcctttttctattctgtcaagtaatttatcattcttccctctgatttctgtcttcatttagattaaggattgcagatatcttttagattcattgaaccttttttaaaaaactttcttttttgacttcttacccctgtggtaaatttgatgggagaaaggattgaaaaggtataattttagccctaaacctcactacctaattaaattagttctagcccagagttttgcctggatctattataatctctcaaaggactggttgctactcctgctaaatgataataagtataatttataaatttaatatatttagtaaaacacaattttcattagtttataaaaatatcacattaatttcttatgtatgtatttgtatcttctcagtgcttgagatagagtaaatgttccataagcattcaataaatcaagtacatgaaagaatgaataaagcaagtaacacattgtttatgcgtgtatatttatgtttcacagtacaaagctcctctttaggtaacaagggggttttctcactcactatatccagatttgacttattatgatgacatatttatgagttcaatagctaaggaaaatatgaacttcatggtaccaaagtttatatcatttatattcatataacaggttcaatttttgttagtgatgcttttcgcaatgtgtccatgaaaatactacgacaacatgacatttagaaccagtagatactctagtcagctcccatttcattttgttcctttaggctgcagtcttattgctaatagaaatatcatgcagctagcagaggaaggtacctattttgtattatgtatatatttatttttacattaccaactattaatgccttgttaggattttccagagaaaaagaatatctatgtgtgctaaatatacctaattatacattaatatatacagtgtttatttgtatataaaacaaattgtatgtaaataaaaatatttgtttattttaaggaattggctcatgcaagtatgggagttgaaaagatctaaatctgtaggacaggctgcacaggctcaaaactcaggcaaaagttaatgctgcagttttgagggagaatttccttttctctgggaattctcagtttttgctcttaagaccaccaactgattagatgaggcccacctaaatcatggaaggtaacatcctttactgaaagtcaactgattgtagatgacagctacatgaacaaaataccttcacagcatcacctaggttagtgtttgaataaataactaggtaatatagcctaagcaagttgatatgtaaaactaaccattacaaacatcaatgggatacatgttaaaagtgtctaaaaaagtgtttatttgcttttcttagattttatggactaaattaaaatgtaaaagtcaaagtagtgttacaaataaactcatatcaaatgcaagtgtattcattttaaataactctcagtttctcagtgaggattatgattattttttctaagagttacagagccgttcaaaaggctctctttgtttagaaatatggacagcagatgaaccagaggagaaccaggtaagaaaatagaaattcacagtatagctttccttaagttgaaataaagttaaataaatttaaaaaaataatttgcagaatatccataaagaaaattgagatcaaatgaatgaactgtaaagcaaattttaatttaaaagtctggaacaaggcagagctcagaaatttttagtaaatctaataactgccctataataaggattgtaatgcaatgcaaatatgtaactaaacaattcattgagtgggtgagagatgaagatgaagttcatacttttgagaaaaacaactgtagtcttagaaagtaaatgacaaagattaaacagtaaaaatgtctaacaaatatagagattattattattaaataataatggaggaactagaagttgggagaaattgtagcactagaatttataaaatttctttggagaaaaatatgtagaaaccatcatcttgtcctcaagtcttgaataagagtgtctcagcagatttccatccctgtactaatttaggtccaattgcaaaggattggttctcacttagtgagttgagaccaagagtgttctagaattgaatattaaatatccagggaaacatatgttgcccatcaccaaccaagcttaaaggtaactctttattttctctttaaagacaattttagtggtgtcccctaaattcaaacttagttaagagggttgttacagtggcaaatatagaaaagcaccacattatgattagcattcaccctgtgaagggactttccctgaaagaacttagtgaaacaactcagcaacataaagaagtaacctgttactctttcagaaaaaatggaatggaaattgtttttcacaggagctccctttggataacaagaaaacatacccagcaaggataattcatattcactcacaaagaaattctgggaagtctaaactaaagtttgataagtacataatgtttttactttggtttagtttggaacagaaaaacttgtaatacaaacctccaggaatgtttctcagtctcatgctctcaggtgttgccttcttatctaacattttagagtcaaaaagaacttttttggaaaatgacattttctaatttagcttgtactctttggtcttttttgggggaggaaattccattttcccaattgtaaaataacaaatgcttgtttaaaaaatttatctctctctctctctctctctcacacacacagacacacacacacatgattagagctatatataccacaatataagccgttgttgtctaaaattttataaatctataaaagattctaattgtttttcctctcttatattttaaaatatttctataaaagcatgcaactttttgttttataagaaaaacaacactataagtgttggtgtctttatctttctctaggagagattcttagatataatatttgccataaaaattaatgaaacctatttcagtttaaaaacttgaggatgtcattgccaaattctaggtaaccttaagcaaataatgagtttttattttaacttttgactgtggaaaacttaaaacatataaaaaaatcaacagaatagtataaaaaaagctttcattttaatgtattagcagacatgagagagtaatataaaaattcaaagttcatgcaaaaataatgaggcagattgggttgccagtaaattggatgtctatgggcttcatggcacttagtatagaaagaaaggtagactccctgatttcaatctcttctcccattgagttatcagataatctgccaaattcctaattgtaatttggtctttcttaatctgaaatattttggatttcctcctgaagtagttatacattcctcagcctggcattcaaagtgtcaattcatttccatagtgcttctttcagtgagtctcctgtccagtccctgtgctctcatttaaaatcctgagatgctggatttctttttaattactgactattctcaatttcccttcttatcattgatcacggtgtccttgccatctggattataccctctcctattctatcttagcctgtaatttcttttcattcttaaagtctcatgttgtggccatgcctttcataaaatgtctttatcctcatcatcaaattaaatatgctatttttccccttctttttctgcctactgtaattttaattgaggcttttatgtgattccactttctcttttctcttagcatatcaattatactgtaaaaaacatttttagttgttaccctagagtttgtaatatatatttacaactaatataggtcactttcaaatagcacaaataacgtcatgagtactgcagttaccttataagaaaatattccccattcctccctcctctctcttaaaacagtactgtcattcatttcacttatctgtgtgctataatcatccaaaatattgctacaattattagttttaacagactgttttctgttagatcaattaagaatacgaaaaataaaacgttttattctgccttcatttattctccagcactcttcctttctgtgtgtacatctgagtttcctacctttaacatttttcttttctctgaagaatttttttagaaatatttcttgcaaggtaggtgaactggtgacaaattccctgaattgttactcacataagtaagtctttatttctcctttacttttgaaggatgatttcactggatgcagaattctaggttggtgggttttttccaactctttaaatttgtcactccattctcttcttgcttgcatggtttccaaagaaaagtccactgtaaatgttgtgtttttcctctatagataaggtgtttttgctcctctggttcaagtttttgctttgtctttgatttgaagaagcctgaatatgatactcttcaatatagattttttttggtatttatcctgcttaatgttttgaagctgcatttattttggaaaattctcagtcttgttaatgcaaatgtttcttttaccactgtattctccttctggtatacccaggacatacatgttacatcttttgcagttgtcttacatttcttggatattatattatgttctatttttttcatttctttttcttttttggtttggtaagtttttaattgacatatcttcaagctcattgattctttcctcagcagtgcccagtgtaatgagaaacccaccaaagactttatttctgtttctgtgtttttaatttctttcttttttttttttttttttttttttttttttagacagagtctcactctttcacccaggctggagtgcagtggcatgatcttgggtcactgcaacctccacctcccgggttcaggcaattctcctgtctcagcctccatagtacctgggactacgggtgcatgccaccatgcgcctggctaatttttgtatttttattagagatggggtttcaccatgttagccaggatggtctcgatctcctgaccttgtgatctgcctgcctcagcctcccaaagtcctgggattacaggcgtgagccaccgcacctggtcctgtgtttttaatttctatcattgcctttcagttttcccctagagtttccatctctttgcttacatcacccatctttccctacatgttgtcccctttttccattatactccttagcattattattaaattttaagttcctggtctagtaattcccaaatatgtgctatatctgaatctggctttgatgcttgatttgtctcttcagagtgtgcttttttgccttataatatatgttgtagtttttttttttttttgaaagccagacatgatgtttcaggtaaaataaactgtgataaattgtcttaacttgatatattatgtttatctatctagaagttaggctgtgtttatagtttactataatggtaggtgtcagaggctacattttcatgtagtgctttcttttgtctgccctgttgactttagtctctagagactccttcttaggtatggtcttaaatgccattctttgagttgtagtttcctgttattatacaggagcactgttgatgtggtcgtatgttatggaggggggatttctataatttatgattaggtttcagttattagtgagcctgtgtctctaggctgtgaccttcacaagtgtttctcagcttttttgtcccctttgggagagatagaatggctagtggaggcttgagttgggtgttccctttcctttatgtagaagtacagagaaggttggagttgggtattgctttttccccacatagaatattagaggtggcttggttgggtaattcccttcccccatgatagttagtctctggtaaagcacaagttggttaggctgtgctaaaatagttttccttgaggacaggcattttttaaggagaacagaatgctctgggtatgtttcagaatagttgcttcttctctcaccctgccagaagcacaaggaaatttgtctcatcttcaccctgagaacctggatgggcccctgaaagtaagactcagaaaagtgtgggaggccctcctaaacatactccccaaccctaggagttttatctcttaaacaattctacctttagtccccagttacccttctattcttccaggtgctgcctccagcagtcgtttttgcccccagtgagctatgactgtttgtatttgcctacctgtctagtttttggggtggtggtttgccctgtgacctcaattctctggtgaatctaagaagagttgttgattttcactgcatctgctatttccttgtattgaatcttctctttaggcatctatatcatgattttgcctaatcttttttattaaaaaaacttggatgaaaatattttactttgctcatatatttataccttgatctctctattatgttgaagacattaaatacaagtatttattgcattgaacaggccattgtttaagtgaaactgcaaccttaagagaagtgtcttaaataaaatatacaatagctgctatgaatagtagcaggagttttaacatagaaaacttttttttccagtgaaattttatatagaatatatttactgaattgcttcctttagtggtcactcatggactttgttctggcaattattttttattcattaattcatttattgagtatctactatacgccaggtgccactctagacattctagacattgatgaagaaaacaatgaaagcctcccacctctgggaaggcatatgtttcagtttagggaaacaaaaatagaaaatgttcataatataaattaacaagttatatggaatgatagaaggtgaagggtgacatgaaatagagaaatagaaaagggcaaatagaagagaagattgcaattttaaatagtgcatttagagtaggtctcactgccgagatgatatttaagcagacttgaagaagaagaggagttggctgtgaacatatctggctgaagtatgtaacaggcagaggaaacaggctgtgcaaagatctgactgacaatgaggaggtccgggagacagcggggagttagagtgagacaaaggagtagcagatgagacccaggtggtgccaggggccaggtaaggactttggcttttatactaagtgaaaggactgacactgtaggcttataaacagaagacagacataaattatttagcatctaaaaataatatttgctttccctattgagacttgactgcaaggataccggttagaaagccactgcaacaatccaggcaaaagacaatgtagcttagatcaggatagtcctgatgtaagatatttcaggtgttaaaaaagagaaaagctaaggatgtctctgagatttatggactgaactgaaagaaaagagtttccaatagctgagtctgggaagacagcatatagcttaggttttggaggaagattagatttcagtttaagcatgttaattttgagacatctattagatgtccaagtggagatctgaagtagacatactgcattcaggaaaatgttttggctggagctatactttgggtagtcatcagcataaagatgatatttaaagacatgagaccacttaagatcagtgtaggcgtgggtgtagatagagggaaaaagagaaccaagacaccctaaaaggtgtgtgtgaggggtgggtggtgtatagggagaagaaatcagcaaaactgagaagaatcacaagtgacataaggggaaagcaagtgagaaaaatgtatcaaagaggagggagtctaatccactttgtcaaatgctgctgagatcttaagtaaaataagataggctagcatcatttcagtggatttaggcacagaagtattgaagataggtcagtaattgaatacaaaaaatttaagagttcggataacatggcctgtagggtttctccagcagcaataaagtcctccaatgcattaaagctattcccagcccacagcacccaccatgtacaaagacagattgggatctagcttgtattgaaactgatgttctggtggatcaattctgagttctcaggaagtccttgatggcatctattctactaatctctagctcttccctagacttgaggaatagcatgagcctatctagagctagctctagaattcttaaacctagctcattttgattcaaacaaccagaattttagtttctaaacttaccttgaggttcagggaagccagtaggtataatgttaaaagttagtgcatgctaaactttataacataacttattaatgtaagaagtgctctttcaaccctccttttttttctaaaaattaaaaatctttacaattttgcagatctttagcctataggcaaccactgattttttattttttttacaagaaaataatactttttccttgctgcatcttcagaaactctataattacacaggacatataagtaatacataaatcacacaggttttttgatgctgcataaacagttaataatattaaaagtaatatatgtaatgttttataagaggatattctgtcttctaaatattccaaattgttcattttcaaaagcatggaaggaagaaaaaaatgacggaagggtggctggagatattgaaaatcaatgccatatcatgaaaatgctataaaatttatgttagtaaattatcaagaaaatatagactattataataccctgttaatattaacacataactttattatttttttttatttttatgttttgagacagggtctcactctgtcacccaagctgaaatgcagtgggtatgatcatggttcactgcaacatttgcttctcaggctcaagcgatcttcccacctcagtctcctgagtagctgggacatgccaccagattcagctaattttttctaatttttgtacagagacaaggtctcactatattgcccaggctagtctcgaactcctgggctgaagcagtcctcccaccttagcctcccaaaatgctgggattacaggcataagacacagtgcctggccaatacataagtttattaattcaggaccatttataatgataagatgttgggtggtatatgaggaacaggtaaataaatgcaggacaatattttaagcatctctgtagtctcaaaggaagactcgtgagacagtggatgattggaaaaaatacagatatccattaaccccagtgacgcatgaggcaatgaatacattggtgagtactcaccagcatacctagggctcttgaatggctcctctgattgtgacccactctgcaccactcctttggtaggcaggtataatataacaccagtggagaaagaaagaactttgacattggaaaaatattgcatcttggtatttattttcgcatattaatctcaagtagcttgtatcttaggattttgcaatattgtttcaactcacaggatatgatttggtataaaggtttgttttgggtcaaaactgtcttctatgataatttgatatataaagtctggccctcaagaatatgacttaaaatgacctaataatttataaaccttcatataaaatttatgaacacatttacatacatattcacacacatatctatattcatgtatgttatggatgataaaagtataaatataagcacaggaatatttaacatgagaatcaggacagtgatcgtacgtcagtagaagtgaggatatgattttgaggaggttccctagagctccaaggtactggctaatgtccgcttcttaaactgagtatgggcttatgcgtgttggttttatattcaatctctttcatcttaaaatttgaaaaaaggaaaatcacacataagaaatgatatatgatgatcatctgagttctttattttgtaaaagaaatttatttatggcatcaggagagtatctcacagcaaacgttttgaagtacaaaaatatcatagtgatttattttttctttttagttcgaaaagatataatccgcatcctccccagtctagatgtcgaagtcaaagacatcactgattcttacgatgctaactggtttcttcagctgttatcaacagaagatctttttgaaatgactagtaaagagttccccatagtgactgaagtcatagaagcacctgaaggaaaccacctgccccaaagcattttacagcctgggaaaaccattgtgatccacaaaaagtaccaggcatcaagaatcttagcttcagaaattagaagcaattttcctaaaagacacttcttgatccccactagctataaaggcaagttcaagcggcgaccgagggagttcccaacggcctatgacctagagatcgctaagagtgaaaaggagcctcttcacgtggtggccaccaaagcgtttcattcccctcatgacaagctgtcatccgtatctgttggggaccagtttctggtgcatcagtcagagacgactgaagtcctctgtgagggaataaaaaaagtggtgaatgttctggcctgtgaaaaaatcctcaaaaagtcctatgaggctgcgctgctccctttgtacatggaaggaggttttgtagaggtgattcatgataagaaacagtacccgatttctgagctctgtaaacagttccgtttgcccttcaatgtgaaggtgtctgtcagggatctttccattgaagaggacgtgttggctgccacaccaggactgcagttggaggaggacattacagactcttacctactcataagtgactttgccaaccccacggagtgctgggaaattcctgtgggccgcttgaatatgactgttcagttagttagtaatttctctagggatgcagaaccatttctagtcaggactctggtagaagagatcactgaagagcaatattacatgatgcggagatatgaaagctcagcctcacatcccccacctcgccctccgaaacacccctcagtagaggaaacaaagttaaccctgctaaccttagcagaagaaaggacggtagacctgcccaagtctcccaaggtaaggctatggttttgcaatgttttctctggagtgtgttccttcaggcaatttgtttcaagtcttttctgagtgtgttttgcttacttttctttctttcatgccatatttgcaatgagcttttctgatgtgcagtagatgaatgaacatcaacagtgtgtaagctgttgcagcgttttatattttgatgtggcatgaagtttaatattgaattggaaatagcagagatgacatttggatatgatgacccaaattgccttttcagtgggttttggtaattaagaatattttataaagtgccttagaagcaaacctcttttattttagaagttctgttaatttttttttctaagtaaaatttaatacctcatccaggaaattaacatacagtaaactcccttcttctggggatggggggttactggtagcatgcatctatagcacatgtcttcattttgttttatgtgcagaaagatgtaaaaatatcttggcagaacagtgtgtgagaatgtgagcatctgcccacattctgcttatcttagaatcgtaatctttaacagctctattgaaaaacaaaatcaataaaattggagacagtatgaaatcattacagaatcaacaactccataaccactctaaagattttggagggtgattcagcttcatttccacttgaggtctttgcctcttgaaaactgccttctggctgcctgcaaagcgcttgcccttacaccatgatgtgtaggtcgtttatccagacgtggttctgtggtgtgtggaaggagtgcattctggtctggcagatgttgtacttgcagcttggggaaacaaagcaattagtaaaacaaagagaggctgtgtttactctctatgcttagaaataatagcagccttaggcttcaagtatatggatatggaaatacttttatttctacatctcagatattgcattctgattgtagctagggaaatccagtaaggatctccaaaagcatctttagaaaaagataaaaccagcagaaattttcttcccagacaaacagttttgaaagagtcatttgatataatacaatgatttccaaataatgttgattaacgtgttgctattgttttgaagggtatctttggcttctcccatttaacatatttttattactgaactgaatagtgagaaatgaaatgagaaatgaaatgtcttctttgtgttttagtggtaggcagaataatttccccctcactcaaatatttatatgcctaaattcccagaacctatgaatatgttactttgcatggcaaaagagactttgcacatgtgcttaaaattaaggacatcaagatgagattatcttggattatccaggtgggtccaatttaatcacaagagtccttacaagaacctttccagataagatcagggttagagggacatgtaactatgtaagaatggtcagagatccaacattgctgcatttgaagatggaggaaaggaatcatgaactaagcaacacaaatggcctctagaagccagagaagacaaggaatcagattctttcccagagtctccaggaaggagtgcagctgacaacactggttttagctagtgggacccacgtcagctactaacctataggactgtaaaataataaatttgtattatttaagccactaagttgataataatttattatagtaacaatagaaagataatataagacatcaagttgagaaggaggaatacttaaaaaccatagacagtcaaatctatatgcaagtcactacctgttttgctggaaactttttgttgttgttgttgttggttttttttgttgttgtttgtttgtttttgctttaaatgaatttattagcacatgtacccatagagcacttaagggtacagctaagcttcaggaataattggaaccaggatcttgaaaacagcctaagttgtttttacttttcattacatattggctttcttttcccaggcaaactttctcagttttttttttttccagcctactgctaagagttcctgcatctcacgtctcattttttcatccctagagaagaagataatctctttggctcaaaatttaaaaatgaaagggccttgattggattaatgcccatctcctgactcaactaatttattgcttactccaactagaggcacgattggagggtatctgtttgcgctattataacataataccacagactcagtaattcataaagaacagaaatttattgttttagagctctggaggctggaaagtccaagatcaaaatgccagcaggctccatctctggttctgagatggcctcttattgttccatttactggagagaaggaatgttgtgttgtcacaaagcagaagtgggggaactctttccccaagcccttttcttagcagcattaatccattaatgagggctctgcccacataataaaaacacatctcattaggacccaccttccaacaatgttgtgttggtgattaagtttccagcatatgaattttggagggaataaaatatttaaaccatagcagttgggaggagaatgaggtgtggttgcctctagtatctagcaatacagaattgcaggatgtgaagatatggagatacaaataatagatgtccactaccatcagaaagaaagcactcatagggaaaaaaaaaggttaaaatttttaaaaattgtcctttgccaggcattaaatgaaaatgatctaagtgttttattaggagagaaactcacagaacaacattacgcctagactactaaactgaagtgaatgaaatctttgactaaacctgtacatgtaggattccagatacttaataattcctagctgtttttttactggtcagaccccacatggagtcttggtgttcaattctgagtctcactctagagacttttaactggagtttgtaaggagctgttaaagatgttaagaggttctggagccattttcatttgaggaatagttgaagacattgagtgataatctaaaattggaagacttgatactagatgatattagttattttatacatttaaatagttgctttgtggcagagtgcagacttatattccattatgacatcttcaacactgggtgaaagttaaagggaggacaaatttggtgtaatatgttggaacaggtttcttctccccaaaatgtttatagtagaagataggaaatcatgtcagtgatattgtcagggaatccctgctttggttgagaatttatcagacagttgagaagagtctacagttctttgtttatgaatagttcctttaattctagtgtgatagataaagcattatattttctctgaaatcactttaaaatgtcagaggatgctacaattcacctgtatttagacctactaacctccttattttcagcgattattttttaccatgaaggcaggaatctgcttaatacattgtttatagaatgtaaacagaagctctttcagtttcttcataatctactccaaaaattttgcaaatatttcttattctcacaaagtcatcctttcatatattccttttatgtttcttttgatatttacatgaagtctcttctatcatgtgtgcttttgaagaacattttttatacttcataggtaggaatcagccattaaaaaacagcctctaagattatggattatatatggaatattgctttaaatttggataacaaatagtaagagttattcagagtttaaatattcaaactcatttagctcattaaaatgtggttttacatgcacagagaagagtcctagatgcttcattatatgaatttacttttgccttcccaatggatcattaactttactaaatcatttcttgcattaagtaacagacagatgtatgggcaatctaagagtaagaatctaaaattcaccctgcattagccaaattaacctatagcaggtatctgcggttggttatgaacactacaagctcatctaaaatgtttggaaattaagaatatatgaggacaggttacaggaactaggagaaatagaaagaattgttttccaaggtaagattggcaactgttctccagctttagcaatacctaaaaagaaaaaaaaatagattggtgtagaaactttagaattataatttcagtttgggcagggacacgagtgggggtatggttaccaacaggattatagcctacttcaagacctatgagattttatgtgaaataatattatagttgttctttaaatgtgttagttaactgtttataaggataatgtatggaatctaaacaaaggagtgggaataggccaggggaatcctcaaaattttctttaggtttatgacataatgcagaaataatgtctttaggatctgtgcatctgaattttaatctgatggaaacaatattataaagtgactaaataaatgaagctgggcctgaaattgtgttctaaatagaaatgttgtcaggtagattctccttccttgaaggttggtttgtatgttagaagtggtttcagatagttcagaagaacatatactcactggggtttttgcctgtcgtggatatatatagctacgactcctgagtgccacacaggagaaatgcaacttctgtattctgatgaaagggtctataacaagacagaaaacaaacctttggttgaaagatgagatattccatgtcttcagagactgcagctgggaccagaaatcttgtatttcactaactctgtttggccatttaatgcccaagtgtccactttgctgcctgagtttctagatttctgtcggacaagaacacccataggagacattaaggcaaagagcaagggaggcagtaatggcaaggtactgtgaaatgagcagaaaaaaatcctgcaccagaattagagtgagggctgaaaaaggcagaaggaaagcaatggttcctggggagtgcacagagaacacttcagcagctgctgctggtgctaaattgtcacttctgatctggtttgacagttacagtggctgaaatgtgttagagaaatccacgttactgggctaaatctagatcattagagagtagtattatacccacttgtttgttatcaatagggtttggtcacaaacaatgtgacttgtttttgtttttgttaacctgatgtagtataaatacattaagagtgtttgaatttgtagctgactctgagcttctgaacactcacacctttctactcatggtaggtccttttcgtgtaatatagaagctgtagtactgatttccctctgaatagggaagattactgttagagagtttttcaaagacccaacacaatgaagatagaatacggacatatttaaatattgggtttttgaatctgaaaataagagaaataaaggaaacttttgaacttcctttaaaaaattgacaaattttgactgtgagatacaattttagcttttttgactgtgagatacaattttagcttttttgactgtgagatacaattttagcttttttttttttaatgaattctcactctgttgcctaggctggagtgcaatggcgtgatcttggctcgctgcaacctctgcctcccgggttcaagcaattctctgcctcagcctcccacgtagctgggattacaggcaccccccaccacgtccaggtaatttttgtatttttagtagagatggggtttcaccatcttggccaggctggtcttgaactcctgaccttgtgatccacccacctgggcctcccaaagtgctgggattacaggcatgagccactgcacctagccaatgttagcatttttttggtagctatttgagctttccttagagtaagacatgtacagattaataaatcatggtttttgagttgccagaggtctgttgtctagtaaatggcatgggctataaacagacaactaaagaagtgaaaaagacgggagaagagggcaaaggatgaataaaggaagtgctgggttgaaagttagccaaacttgagttatagctgaaacctcgaaggtacaaatctgtgcccaatggcatgtacggaatatttacaagctctttttgtgcttctggaatgggagaggagtgatctgaattttagttttgctctaggcatgacatgtactgtgttgatacttctatctggatagctgagttggtataattgagttttaaatgaaaaggaattggttaaactaaaatattcgcaaatatcacctgattttagggaaatttcaagaaacaatgaacaagtcttcatactaataataaaatactgattttctctggataatttatggctaaagaacatggttttcattatggcatgattgaagtacactttcaattggaaatatgtgaagaaactaaaattttggccctctctgaactttttaacaactgagaatgttctcacctgggggcaatgatgaaaaacattagctaatactgtcccccactccttatctatagtgtcaagaacaaaaataccaccaaatatgtgatgtcatattttcggtgttactgagtattacttttttagcagaaaaaaatgtgaatttataaaatttatttattttctcaatagattagcaaaaagcttgagcaaatttggactaaattattttgcactagatttctggcctttaagaaaattagaatagttttcatttactaaaatgtccactacatggaaattcctgtttgaaatgatagcaataacagaaaaatgatcagttcattgcacagtatgtattaagtgagagcatttgaattgccaacttcctataatctctatagaaattttagtgcctgtaatcactaaaattgagtgtgggctcactagatatttatgttcctttccttgagcttattaccttcagtttttctttaaaaaaaaaaatcaaaagagcagttgaagaaaagtagaggagataagttccagttggctatgcagttttgaaacagatttgtctgaattttccattactatatttgtcaattgtgaatttattttagaataaaaccttgcctaaaaataaattgataacacataagctatatatttgagcaaataagttttgctacaattccccagttccttgcaagttaaccattacttttaatcttcggtgatgttttcattgatatcagacctacatcaataaatatatttatgctttgcttcccaaaccaaattttcctggataaatattaggacagaaaatgagcacaagatggctatgaaagaatgcaataaaataggcttccaaaaatcagtattttttcccaaactttgaaaagtaaaaaacgtaagaagaaaaagatttgtcttagaaatagaagagagtagaaagtgaaaatgaactttaaatttaagagaccggagggcccataaatactttaaaaattcatagacaaagaaaagattcatgcatgcgttatttaaggaaaaactctcagcaaaccttttatagccgtaaactttctcatacactttgtccagaatctaacttcagtataatcatgatgtcttagaaactttctaagcaatacttaattaagatacacttctaataggacaagttgcttttagcctctttgtaagaggttaaaatatctctaatgctctcatttgagatatttaccattggtctcctttgagatatttaccacaagccaattacacagacgattttagatctcatgagaacaaaataagagagaattctataaaatcagaaggctgttgactacaaaattagacaaacaagaatcaaactgtacattaaaggccacaagaaatgtataataaatccactgttatttatgaaggtgcacacaaaattaaaaaggctgattataaaattatgaagtcacacaatatataaaaggaataaatatttgttttttttagtgtaactgaaaagataccaatattattctgacttgtgacattacgctcattcagatcactaaactttacataccatttgtccttaataaaagtttgttgttgttatcaaatgcttttaaaagttgtaattaatgtcttaaaagtatgcaattaccagttgtgaaataggataaaacacaaagtcatgtaagacgtgttttctcaattgttatccaaggctgagaaccaccctatccaagctattctcttcattggttctgatttcagcttttctcctgaggtaaaatcatttctgtattttccattcatactagactctgcttcaaccaaattctcacaatgttgtcagacatcttgtgttcaataataaaatatccaaaggtctatgatccagactgatctcaatcttttgtaataaaaacaccagctgctcattactgagctggcgctataccaggtgcttacatgtattaatctcttatttaatcttccacattgctccatgagatggatgctgtgatcatctctattttgcagataaggtaatttaggctaaggggtatataaggtgtgtcatggttaccaatgatactcaggttgccagattttatggtcaatcctcagtcctcatattatttgaatactaggtactatttggcacagttaaacactacctactttttaaaatcctttcttagaattctgcaatattatgccttcctgatttctttatactgtagtggttgtatttttctctcatcttttttggtagctcttctctgatctcccttaactcttaatgttcaagtgcctttgagctcagtctttggtctcttttctatatatgtctacttttaaaattcctatccacacacacaaatttcttattttatgcatataaaatggctgtcagtagaattattcatgtatatggattcataaaggaaagcaaccagaaatggtgtcatatttttctgttaaaatctgcttaaatatgtgtaaatgtcattttttaaggagagttcagctcctgggagatgctagctgtatcactatgtctgttctgtagcagttacagttttcaactatacctctggaagagattgaaggtcagggaaagtgatcaggtaaggaaagagccttcctaccgacatgctattctgatgaatgtaggcttatcatgcttaggacttttctttcctgatccactgatgtgaagaaagttgagaatatcttgaactctctatgagacattacaactttagctgatgaactttggcatcagcaaaaactctttagtaacaattcaggatttagctgaaataagtttcaggaagtagaactaagaataggagtagaacttaggactattaatttgaataccatattgagtaggtgataatataagatccagagagaatatgaagtcttctcttcattaaggtagatagggatgtataacaggaaaagattaataaagggttaatgtgttcaggagcacagaataatgaacactttaataataagcaaagaaaaatttagaaaaaaaagaaagcagatcagtgttttcctagagagataagtaggcataacactgcctactcaatgacaaatgacaagaggaacattttcgggtgatgaaaaggttctaaaactggattatgataatggttgcacagatctataaatgtattaaaatcatagcgctgtacacttaaaatcatcaatcatacctgaatacagccattaaaatattctaattatagcatagataatcaattcaaacagaggcagggagaccagttaggaagctaaaacaataatataagagagaggatgcctgcctctgtgaatggaagacacatattcaagagaattttagcatatggtaggtgtaggatgtatggttgataaattgtagaaaataagaaaggtacaagataaggaaagtatccagatttctaacataagcatcagaatggatggtggtgaaattgattaaaacacattcagaaaattcattaaaataaaaaacacagaacataggtagaagaatagcacattat

SEQ ID NO: 836 - DNA, 1761 bp, Homo sapiens
caatggcattatcactggaagaattcgtccactcccttgacctcaggaccctacccagggttctagaaatccaggcaggcatctatcttgaagggctctatttatgaaatgtttggaaatgaatgctgtttttcaacaggagaagtgattaaaattactggtctcaaagttaagaagatcatagctgaaatttgtgagcagattgaaggttgtgagtctctacagccatttgaactgcctatgaattttccaggtctttttaagattgtggctgataaaactccataccttactatggaagaaatcacaaggaccattcatattggaccaagtagactagggcatccttgcttctatcatcagaaggatataaaactagagaacctcatcataaagcagggtgagcaaatcatgctcaactcagttgaagagattgatggagaaataatggtgagctgtgcagtagcaaggaatcatcaaactcactcatttaatttgcctttgtcacaagaaggagaattctacgagtgtgaagatgaacgtatttacactctaaaggagattgttgaatggaagattcctaagaacagaacaagaactgtaaaccttacagatttttcaaataagtgggactcaacgaatccatttcctaaagacttttatggtaccctgattctcaagcctgtttatgaaattcaaggtgtgatgaaatttcgaaaagatataatccgcatcctccccagtctagatgtcgaagtcaaagacatcactgattcttacgatgctaactggtttcttcagctgttatcaacagaagatctttttgaaatgactagtaaagagttccccatagtgactgaagtcatagaagcacctgaaggaaaccacctgccccaaagcattttacagcctgggaaaaccattgtgatccacaaaaagtaccaggcatcaagaatcttagcttcagaaattagaagcaattttcctaaaagacacttcttgatccccactagctataaaggcaagttcaagcggcgaccgagggagttcccaacggcctatgacctagagatcgctaagagtgaaaaggagcctcttcacgtggtggccaccaaagcgtttcattcccctcatgacaagctgtcatccgtatctgttggggaccagtttctggtgcatcagtcagagacgactgaagtcctctgtgagggaataaaaaaagtggtgaatgttctggcctgtgaaaaaatcctcaaaaagtcctatgaggctgcgctgctccctttgtacatggaaggaggttttgtagaggtgattcatgataagaaacagtacccgatttctgagctctgtaaacagttccgtttgcccttcaatgtgaaggtgtctgtcagggatctttccattgaagaggacgtgttggctgccacaccaggactgcagttggaggaggacattacagactcttacctactcataagtgactttgccaaccccacggagtgctgggaaattcctgtgggccgcttgaatatgactgttcagttagttagtaatttctctagggatgcagaaccatttctagtcaggactctggtagaagagatcactgaagagcaatattacatgatgcggagatatgaaagctcagcctcacatcccccacctcgccctccgaaacacccctcagtagaggaaacaaagttaaccctgctaaccttagcagaagaaaggacggtagacctgcccaagtctcccaag

SEQ ID NO: 837 - protein, 565 aa, Homo sapiens
KSRQASILKGSIYEMFGNECCFSTGEVIKITGLKVKKIIAEICEQIEGCESLQPFELPMNFPGLFKIVADKTPYLTMEEITRTIHIGPSRLGHPCFYHQKDIKLENLIIKQGEQIMLNSVEEIDGEIMVSCAVARNHQTHSFNLPLSQEGEFYECEDERIYTLKEIVEWKIPKNRTRTVNLTDFSNKWDSTNPFPKDFYGTLILKPVYEIQGVMKFRKDIIRILPSLDVEVKDITDSYDANWFLQLLSTEDLFEMTSKEFPIVTEVIEAPEGNHLPQSILQPGKTIVIHKKYQASRILASEIRSNFPKRHFLIPTSYKGKFKRRPREFPTAYDLEIAKSEKEPLHVVATKAFHSPHDKLSSVSVGDQFLVHQSETTEVLCEGIKKVVNVLACEKILKKSYEAALLPLYMEGGFVEVIHDKKQYPISELCKQFRLPFNVKVSVRDLSIEEDVLAATPGLQLEEDITDSYLLISDFANPTECWEIPVGRLNMTVQLVSNFSRDAEPFLVRTLVEEITEEQYYMMRRYESSASHPPPRPPKHPSVEETKLTLLTLAEERTVDLPKSPK

SEQ ID NO: 838 - DNA, 43572 bp, Mus musculus
ggccaattaggcagcagcctgtcccatcacactcactatcagggacaaggatgcaaactagtgctccgtcaggttctcttcactgtctacagtccagggtcttctgcccagggaatggtcccagtcacaattacatcagctctttccacatcagttaacataaacgagagtcatccacgggtatgcccaggggcccttctccaaggagatcctagatcctgccacactgacagttaatgctaaccattaggcttcaaaccctgaaaataccacagttactccataccatgtatacccctatactgtgtgtcccccatagcatttatcccccaattccatgtgtgatggtttgtatatgctcggccatggagtagcactattagaaggcgtggccctgttggagtaggtgtgaccttgttggagtaggtacatgagtgtcggctttaagaccctcattttagctgtctggaagccagtattgtgctagcagccttcaggtgaagatgtagaactctcagctcctcctgaatcatgcctgcctatatgctgccatgttctcacctcgatgataatggactgaacctctgaacctgtaagccagccccaattaaatgttgtccttataagagttgccttggtctggggaggggatagggggtttttgaaggggaaaccaggaaaggggatagcatttgaaatgtaaataaagaaaatatctaataaaaagaaaaaagaaaagaaaaaaaaagagttgccttagtcataatgtctgttcacagcagtaaaaccctaaaagaccatgtatcccctcataccatgtatcccccacatactgtatccctccatactatgtatctatccatccataccatatatcccccataccatgtatcccccacatactatgtatcccctataccatgtatcccccatactatgtaaccccataccatgtataccatgtatcccccacactatgtattctccataccatttataccatgtatcccccatacaatgtatcccccataccatgggcatatactgccacacagatacagacacatgcgcataatttaaaacaataaaaattggatgatagggtgagattgcacagtggttaagagcgccgactactcttccaaaggtcctgagttcaaatcccagcaaccacatggtggctcacaaccacctgtaatgaaatctgatgctcccttctggagtgtctgaagacagctacagtgtacttacatataataaataaataaatattttttaaaaaaatttaaaaaattggatgataaaaaaattagatgataaagatgcgtatctctaccctcgcccacccctgaagttgtgcttccgcaatagaattggctaagagctcagtgattgagagcactgactgctgtttagaggaccaggactccatttccagtgttgagaggggaaaaaaagtcatgtttcagaagtcacctacatgaggaaattataatcttaaaccataggggaaattgcttttattattgttgtttattttatgcatgtgggtgttttgcctgtatgtctgtgcatcgtgtgtgtgcacagtgcccacagaagtcagaggagtgtgtgggatgtcctgaaaccttagttacagatagttgtgagctacctgtggatcttgggtatcaaaccctggaacttcagaagagcaggcatttgctcttaactgctgagccatccctccagcaggaaaaaaaatgttttaaatgatagaaatagaagcagtttatttagggtgtatttagcagcattccttggctggaagtttgctagtgtactggaaaagacagatattcaagagccaacgatagggacttttgtttgtctgtttgttgtgttatttcctggagataaacacaggctccaggaggctaggcctgtggtgggccacatccctgaccctcacaggtaagcacagatgaccactgggtgatttgtccccattgtgggtagggactcctcagagcaatgcattataggcaggaaaaacaaagcagggtgtggatcccccggccatcaccattggttgtggctatagcaacggaagacagaaaaaaggggatcacactgtcctccaccccgatgcagaattctgtgttgtggttggacaagctccagctcattcaggagttatgaacaagcatggccactggtttagagacgctaaggagaatagactcaaactcaaaactcatctgcacacattcaccatccatctatctatctatctatctatctatctatctatctatctatctatctatctatctatctatctatcttattcacatagccctggtctctaactccctatgttagaggctggcattcaatacctgaatcctgtatctctctgatactgggatttcaggactgctttccgccagctttcctggatatatcccattttttgtttttgtttttgtctttttttgggacaaagtctcatattgcccagactggtttcagtctcttgttgctccttgcttccactgatgctgggattacaagagggaagacatgcccatttttaaactaaattattattttacctatttgtgtgtgccacaatgtgtatatggaaacctggggacaacttgaaggagtcagtagacccttctgccatactggtcccagggttgaaacaaggtcattggtcttggtggcaaatacctttactcactttgctgtcttgcccaagcctttacacacccattttcaggaaatatatttctccggtagaaaagtattttgaagatggctgctgctatagatccatccacagagtcaacatggcagctttcacatcataacagtaaagatgtcatagctggtggcatatgtgattaaaatgaaaggaaaagactgtcttacaaaatatgaaactctctctggctggagagatggctcagtggctaagagcactgactgctcttccagaggtcctgagtttaattcccctgcaatcacatggtggctcacaaccatctgtaatgggatccaatgccctcttctggggttcatgaagacagctacagtgtacttacatataataaataaataaaacttcaggctggagtgagctgggctagagcgagaagaaaaagtgtctgaagacagctacagtgtacttacatacaataaataaataaatctttaaaaaaacccaaaatatgaaactcttaaatattcctcaacagttgatagtgtgtgagagagagaaagagagagagagcgagagcacatgtcaaagtgtttgtgtggaggtcatattgaaaggcagttctatcttcccatgtaggttgccaggctcctgtagcaaatgcctttacctgctgatgcgtctcattgggccgtgttttgttttataggagtctgggtcttgaatagcctctgatagcctgcagcttttttttctgtaggccagcagagcacagtgcataaaacctgcggtggtggtgcagggcagaaattgtctcccagttccaggccatcctgggctacatggagcctttctcaaacaaacacaacaaatgagcaaacaaagagtatgaaagttttatcttttcattttctcgcataacagagagattgacaggcaggagagtaggcaaacaaggaacctcaataactcactcagaagctcggagctggggttagctcagtggcagagtgtttgcttagtgtgcacggacgccctgcactgggtccctcacactgaaagaaaataataatcaccaactccaattgtctgtacttataaatcctaccagtgtgtgttgttccaagtcatatataaatataatctgtactctcaaaggagttggtgttggggatatttcaggttctgaatcaatagaaaaacactaagaatacaaggaaaatactaaaagaaaaaagtgttgtttttttccaacatcaatcccacctggacattcaatgctgtagaccttacatttctgcagaccagaggcccagggttcaggttcaggtttatttgatgggtacctgaaagactgagctccggatgtctgtcaggcacctttccctgtcaatctgctctttcttgctttgggttttgttttgctttgtttctccagtgctgaggacagaactcagggtttggggtactgggcaagcactccacaactaagtcacatcttgagccctttccatttaattaattaattaatttacagtaaataatttttttattaaatttattccctttacaacccaatatcagctctcgctctcctcccaatacccccttatgcaggtccttcccccatcccccttctcaaagagaaggggaagcccccatctcaaatgtcactcccccacccccgccccctgcacatcaagtccctgcaggaggagtaggcacatcttctcccacccaggccagacaagactgtccatttaggggcgcagcatccacaagcaggcaacagactcagggacagccccagctccagttgtttgggagacctgcatgaagatcaagtggctcatctgctatatatatgcagggggcctaggtccagcccgtgcttgctctttggtgattcagtctctgaaatcacaaagggtccaggttagttgattctgttggtcttcctgtggagtccctgtcttctttgggccccttaatctttctctcaactcttggattccccgagccctcaacacccagagctccatctaatgtttgggtgtgagtctctgcatgtctttccattgccttctgggtggagcctctcagaggacagttatgctaggttcctgtctgcaggcatagcagagtatcattaatagtgtcagggattggttcttgctcacaggatgagtctcaatttgcatcagtcattggtgggccattccctcagtctctgctctttgtccctgcccatcttgtaggcacattttgggtcaaagatttgtggctgggttgctgtccttatccttccactggaagttctgcctggctacaggaagtgaccacttcaggactcatatcccccctgctaggaatctcagctagagttgcccccttacaccttctgggacctctccccctcccaggtctctggcatgtcctggttcagggtatgacttagcccaaaatggcttccaatttaccgtgtagccaaggatgagcttgaatttctaatcttcctgccttcgcctccagaattctgggagacagacatttgccatagtttgtctgtttagattactttaagacagcatcttcttagctagccagactggcctcaaatgctgaccttcctgcgtggcctacaaagtgtggagattacaggaatgtaccatgatccccaactacattcaccttatatatgctgtgcccttgggcctcagaagcattctcaaagtgggaaaagtaattacattcctgtgcttcaaagacctctatagtctctgaatcatgtaagaaataacaggagtctttctatcaagtgctataaacgttgtgtttaggacaaggaattaaaatctttttacttcccttgccttgtaagacttttatacaaatgttttaatattcctcacctagtacatctttgtttccataaaggtccactgcctattctaggaatgtgatggcccagaacagtaacccctccctcttcttccttcacttcctgtctgtcaatctttttcttattagctaatggagtaagattacaaaatctgaccgaagcaagtggggaaagacccagctactgtctgagttagagtagaaaccaaatgcactttctaaaccaaaaaacacctagagtgtgcggggattaaaggctgtgccaccatgcctagctcacagggatagacctcctttgatggtgttgcttatacgttctcatttccatgaaattttctgagacagaccatagatagacaccttagggatcaggttttccttttcctctttttggagaaaaggaactggatgatggtattcatttatttatttcattttgtcaacagaactctctgcagtaaactaatgacttaaactttgtacactgaagatagactgtgatattccaggtgtcttggtgtacatggacatgtatctcggactcctaacctgggacttgggacctctgttgagactatggggtcaaagaacatttcattgtttgtttcatttgctcggcttccttccttcctgttcatgggacacgtcaccattttatttatccttaatcttatacgtgtgggtgtttcaactgcatggtgttgttgtgcatgtgtgcagtaccggagaactgagtgtcaggtatgcgggaactggagtcacagacagctgtcagctgccatgtgggtgctgaattgagagggcatcagatcccattctagatggttgtgagccaccatgtggttgctgggaattaaactcaggatctctggagagcagtcagtattcttaaccactgatccatctctccagcccccaagcaacttattttaaaaaagcatttaattggaggcttgcttacagtttcaaaaggtaagttgatgaccatcatggcaggaaacaaggcagcaagcaagtatggcactgagctgtagctgtgagggacactgggcctggcttgggcttttgtaacctcaaagctcaccgccatgacacaccttcccccaacaaagccacatctcctaatccttcctagttctacacactagggaccaagcattcaaagtctatgggggtcattttaattcaaaccactacaatgtacatgcataccgccatgtgtgtctacacacacacacacacaaaatatgtaatatatacatgcttatatacatatatcttgcaggagccagactttgtggtacatatttgaaatcatagttacttgggatgcttagataaaaggatgggaagtttaaagctagcttgggaactaaaaacagtacttcttaaggaagaaaagccaagcttggtggttcatgtccgtaatcctagctcacaggaaaatgaagccagagcagtatcagaagtccaaggccaacctgtcccacagtccaagcctgtctaacaagacaaaacaaacatagaaaagtttagctcagtcggaggagagcttgcctcgcacacacagcagcaacagagtcacaaataaaagaggatcaacagtttgagatcatcattggctcatctgagcgagagagctggggttgggggagaaaaaaaagaaaggagaaaagacgagaagaagagtgggaagaaaaacaaaaggttaaaaaaaaaagagaggaggggctggagagatggctcagtggttaagagcactgactgctcttccagaggttctgagttcaattcccagcaactcagttcaattctgcacaaccatctgtaatgggatctggtgccctctcctagtgtgtttgaagagagcaacagtatactcatacataaaataaatctttaaaaaaaaaaagagtcggggctatatatagctcagtgctagcattttccatgcaagaaaacttaggtttgatcagtaacacttaaaattattgtatggctgaaggcatagcagagtggtaaagaacttgcttagcaaaagaaaggccttgaagcagggcagtggtggtgcacgcctttaatcccagcacttgggaggcagaggcaggcagatttctgagttcaaggccagccagggcttcacagagaaaccctgtctcaaaaaaaaaaaaaaaaaaaaaaaagaaaagaaaagaaaagaaaaggccttgagtctgagcccccagcacacacacatatacacacacacaaagctggaaggtgaactttcagtcctccaagtggacctttactccatttccacagagatgatctggcgtgtggatctgaggataatcctgggatgtcagtgtgcaggacaacttacagaatgaagctgcaccagtgtcctgtgtgtcctgacatggactgaggatgccaggagtccagccccactcagcctgagcctggagatcctcaaagggttccaaactcttgtccagtgaacgactgggtcatctagagcattgtgaggcaagacagaaccagaacagactcagaaagggagggctgccacagtcctgcccgctcacaatgtgttaatctccgaagacacaagcctaatcaggaaagatggggctgcctctcccaaggtagtattaggggttagttgcagtgctgatctggggtggtggcacatcatttcaacctggaaaacaaatcaaatcttcttgtaggcagaacggcagatgggccaacacagttccctggaggtatgaggcctgaagctgaagggaccagcaggtaactgggcaccacagcctgaggccagtcagtctcaagcaagaacatcctgcttcctccaagggtttctttgcctgaggaaagtggaagctggcactcacattccttcaggatcttcggaaaatggaggcaagggtgatcccgctttgtttggtgactggtgccagtccaaaccggacatgccaaaaatgaccactctcttttctgtggttcaagatttcactccttaatggagatcaaggctgggctccgagagaaaggcaggcaatggcatgaattacagcgatgggtctatttgctgaagcacaaggacagtgtgactttgaccttgcagacctaaaaagggtggcattttatgaaagaaagtgacttattagatgtggttgcacacacctttaactcagctctggggaggcagaggcatgtggagctctataacttttgaggccagattgatttatataacatgctgcgttccagaccagccaagactatacactgaaaccctgtctcaaaaaaaaaaggaaagaaagaaaaggaataaataaaagaaggggaaaagtgacttgaggtttagacaggagtcaaaatagacagggagctggagagtaaagaagtggagaatggaatctggggactccgtatgtgtggggagacctgtgccaacaggcatgtgaggcagcctgcgttagctctggtactttgatgtggcaaaaatctgaccatactgctgccttcctaccctgaatccatcttgaaggagtgtgatgtggggttctctgccttccttaaagtgtctaatcttttgtgcccattgacagtttgtgagaatgttgggggaaagtgctaaatgtgaggctactagttacaggattaagaaacgtcttctgaggtataaggaagggtcagaacctgggccctagcagccttaactcattctcaacaggccaactaaaagacaaagtgtaaggggaaacttgaagaaaggtgttaactcggtctcattggaaagaacaacgacgggacattctcttatcctagtccatcttaggggctgacgtgtggtttgtttaggcttaaaggcaacagctatgcttaagtaagcagtcgtcggcaaggtgtggtcgcatccatcatctgttcgcccagtttctctgggaaggtagtctgacaagttttcccaactgtgatctatctttcctggagtcaagttcctctattggctggcatctgtgcccttgtcctttccttctcccaggaaaactgcaatttcttagagtccagtgttttaatagtctgattgcaatctggcaatcagggtgtctagaatatctttaatcctaccatgatggttacaggttcaagattggtcccgcagccaggcagctcatgcttacttccgcatgccagaggatgagctggctgaggtcggaaatgtcccgacagaaggctggattcctttggccacagcttaaccgccattggcaagaggcaagcggaagttctccgaggacatcaattctccttgctgcgcttaagtcccgccctgctggtctgggcggtgtctccgtggcgacgtgctgctatgtgcggctgcgcaggagtgacggggcgcgggcgagtgggaggggggtgttttggttctcgccgctcgccgtcctttccagacacggcggtaggaaagctgcttgttcctgcttttccttccccttcccttccccttcccctttcccaacccggattttcccttcttccatttacgcgcctcattttgatcgactgctgcccgggatccgagccattttccgggccgggcgctcgaaagcgcgcggccccagggcccggttcatgacccgtcgccctgccgccccttgccttctccgcctcatgtggctgcggggccacggcggcgctgcccactatggcccggaaagcagttagcaggaagcggaaagcgtctgcctcgccaggagccgggagcgacgctcagggcccgcaggtgagggctcacaggtctgggtcatcacctagcaggggcttagggcgttccagctgggttcaggaacctggggccagggcgggacgagaaccggagccgggactgtagagcagtgaccggtccttctgcagtgtactggcgagcaggcgggccggaagggtgaggagccaaaagaaaactacaaaatgacgccttccgctggaagtcagcagctagggatagagagcttcaggacctcctcgttcctggagggaggagaaaatgaagacaaggggaatcggaagtaagaccgaccttccgaagttactgggaaggagattgaagtggaccttccagtggcactaggaataagggccgatggtctcttatcaaggaaaccatctcctaaactgggtgcaggcccctttggctctttagacatctagaagaaacaccaggtgtcatctctatattgccccctttggagaggaaggcctcttggacttgggattccgacgcaggttaccccgttggtatttgatttttcgaattctaaaactgcccgcagcgcaagtcgcgcggagtcagatgagcggccattgactgtacatccctggaagatccgagaccccagtctggctctttgagctatactctttatgctctacggggtgcacaggcggagagggagaagggggctgggtagaagtgcagcccaggtgggttctgtaatatggacttcatttcgtaactatcaaggacacctgggtatatgttatttctgagccctccactttcctcaaaggtttagttaacttttttttgccctgtttatccattttctaagtagtcttcattatgagagccttatttcagtgctagccgagttaaactgtactttctggattacaaatcttctgttaaatgtttgattgtgtaaatcccgaaggacgaattcgtgttggttcttttataaaacggtcagacttcttgtctgaaggaaaagtggccaaacccctgatttctgatgttggctttcacagtttggctgggatcattcgctgcacaaaaggaaaagactccccccagtgaagagatccctagtgtactacctgaagaaccgcgaagtcaggctccagaatgagaccagctactctcgcctgttacatggttatgcagcacaacagcttcccagtctcctcaaggagagagaatttcacctcgggacccttaataaagtgtttgcttctcagtggttgaatcataggcaagtggtgtgtggcacgaaatgcaacacagtaagtatcaggagtgctctttgtcttccttttgttgctgctgcggtttggtttggttgagaccagggtttttctgtgaagacctggctgtcctggaactcactccatagaccaggctggcctcgaactatctatctgcctgtctctgcctcccagagctcagcggtgtgggctgtgcttcctttttcttaggtctgagatgtgggacttggtttactctagcacctttcactgttcgtctttccccgtttgtttgcctttttttttttttttttttttttgtaagcagagttggagtttattaagagatttttaattagaagtgttaggacaaagaagtgctcaaggaatgagtaaactgtagtgtgggtctgggctcttgagggaaacgtgctcccatcagcttccctctctccctcctccttcattggtgaccttgtcctctttttctgcttcttttctcacttctgagtctcccgaccccttcaaatgaacatgtgttttaggtcccctgactctgtatgctgctgcttctagtgttttagataagaggcctcaaagagaaattgatgtcagagcatcatttagggtacacggtagtgaccgtttcattgctgtgtatcagcctttgacatagttagaagtattaagcaccaagctgaaggtagaaatgagacaaatactttttcatatattagaatccaaatgtagcattttggaatctggggcaatagaattgttacagttccaagtcaggcagggctttatagttgagactttgtctcagaacaaacaaaactcaaagatatgattagtttctgggacaaatgtgtgtgtgtgtgtgcctagtggcatatgggcatttgcaaagaagagaggaaaattatggacatgagagtaagggagcagttttaaagagagtaagggttataagtaattggagtagaaatcttatcaggaaactatgtaaccagtatggttacaagctagaagagtcaaaagagtgggtgtggtgcttgctttagcattgtatacatacttaaattgggacgctacagagaagattagcagggctcctgcacaaggacgcttacaagtctgtgcagtggtttatctttttaagaaagtggatatgattggaatggaagtgtgcagatggcaagacatctcagaagtcgtagatgctaggagatgtaggactggagttggggaaatagttctgtctagccctccctctgtttttaactcacctagtgtggatagacaggtaatgttagaatggcgagtaaactgaccctggaccaaaacgtatctggggttatttaaaagaaaggttactctacatcaagaactatgggcctgtgagattgttcagtggaaagatgctcgctgcccaagcctgatccccagaacccacaaaaaggtggaagggacttcataaagttgctttctctgacctccacatgccacactctctgaaacgtacaccacacttacaacacatcacaatagtagtcatcgtcgtaggaataataatagtataaattttaaaaagaaaaagaaccttgggtgctcagtgggcaaaacttgccaagcctgccaacctgactttgacactcaaaacccatgggatgggaggagaacaaactccctcaagctacacgtgcttggcgtggcctgtgtgcccactaccacatacaaataaaagtgtttaaaaaaaaaaaaaaaaggactaaaactgccagagaccataagtactggtagtgtttttataaaggtcataggcaaaattctaatcagttttgaggaaggaagtaatactacggtggctggggccaaattttcacttctgttaaatattgtcttacacataacacttgcaaaactaggtgctacgagcaaacctgcacaaaacttcctttttctgatttcagtcttgccctgtggtttaggaaactgtcattgttgatgcttggagtagaaaaagtgtcgcctgtttcttttaatagtctgttgacagtattttgaagatgagtgtattgctaatcactgaatttactcttaaaaatttctttagcttggcactggagagatggctcaacagtaaagagcattcactgcttttagggaggacctgggtttgattcccagccctacatggtggctcacaagcatctgtattccagtcccaggggatgtgacgctgtcttttggcctcttagggaaccaggcacatgtgtgctgcatagacagacatgcagacaaaacaccatacacagaacaaacataatacgttttgtaaacatttactcttgatgtctacttctgtcttcctaagttaaaaatctatgttaattagtttttagatttcacatgtgttagtgggtgctgcatttgccacagagagcatgtggaggtcagggcaggagttggttcctccttccaccacgggggctcttgggatggaactcatgtcctcagccttagtgagaagctaagtgcctcctcacttcatcgtccctttctctctttgccctggctgtcctgtaactccctgtatagaccaagctggccttgaatttacaagagatctgcctgcttctacctccccaaccctgggattaaagttgtgtttaaatgctcctgtcccctaattaattaaaacttgatacctatttctgtcttctctgtctttatgatgaatacttggaaatagtggaggttatcttttgttttgaggcagagccttacatagttcatgttggctttactatatacccaagcaacctcaaaaaccttgctcctctacccccatttcataattgctgggattatagacaggtactaccacacttgactgttttttttttttttcatttttatgtgtatgggtattttgtgtatatggatgtgcaccacatgtacagagtgcctgagaaggtcagaagtgtgtattggatcttctagaactgtacttacaggcagttgttagacatcatttgggttttgggaatcaaacgtaggtcccctggaagagcagccagtgctccagccccagctgttttgttttggggtttttttgtttgtttgtttgtttgttttgtttgttttttgttttgttttgttttgagacagggtttctctgtatagccctggctgtcctggaactcactttgtagaccaggctggcctcgaactcagaaatccacctgcctctgccttccaagtgctgggatcaaaggtatgtgccaccatgcccggctcagccccagctgttttattcttctttgtttttaattatctcatacattccatccagacctcagtttcccctcccttcactcctcctagcctccaccccccctccacctcccctctctcccaaatcactgctcctccatttcccttgagaaagagcaggcctcccagggatatcacctgaacaaggctggacgaggcaaccccatagcaggaaaggggtcccaagaacaggcaagagagtcagagacacatctcacataaccaagctggattttgttttttgtttttttaaagatttatttatttattatatgtaagtacactgtagctgtcttcagacacaccagaagagggagtcagatctcattacggatggttgtgagccaccatgtgggttgctgggatttgaactcaggacctttggaagagcagtcgggtgctcttaccagctgagccatctcaccagcccggattttgttatttttgtttgtttgtttttattgagacaggatctctcagtatagtactcaactgtcctggaactcactttgtagaccaggctggcctcaaactcagaaatctgcctgcctctgccctcccaaatgctgggattaaaggcgtgcgccaccatggcccagcactgtttgttgttgttgttgttgttttggttggttttattttgttttgttttattttgtttttatagtattgttttctctttgctcagcttttagaaccaaatctgggaaccaagaacagtgtacccttggcttttttgacatttggcaaatacttcttatttttaccatctgtctttggttctgttgatgggttgcaatctgatctcatgtagccaaagactgccttgaactcctaagcctgttgcctctccaccttccaactgccgttggttgtttctgtaaaatagtaatagcattatctggtatgccagttctctggaaactagcagggtgagactgtagcactcgaggctgaggcaggtgggtctcctggttcattgtctggtgtgctggttgaaggttggaaactagctaggaggctgaggcaggtggatctgcctcgagttcaaggccagccatggctatatactgaggccatatctctggtaggtaggtaggtaggtaggtaggtaggtaggtagataagcaggtaggtagatagataagcaagtaagctgtgtgagagattgacattccagtacaacaagcttcaggtatctagagagttggaataggttagactgtgaaaattgatcatctaagattactttataggggaatggagagatatgggaaccataaggttagagtactgctctacggagaagaaaatgcaggaggaatactgtgagagataatgggataaatctaaatgacagaaggagaggatgaagagaaagatgtgagacagctcaggtaggacctgaggtaatgatgtgcttttatcaattggctgatacttaggagaaggtaaaatcttcagtatgggggttactaatttacaagagtattgaaattgctgtgggttttgttttggtttggtttggtttttggtttttttgagacagggtttctctgtatagccctggctgtcctggaactcactttgtagaccagactggcttcgaacttagagatctgcctgcctctgcctcccgagtgctggcattaaaggtatgtgccacccactgcctgtgaaattgctgtgttacttgaaagaaaagacactttggcttctgtcacataacccttcctttaaaatttcagacttttattttgttttgagtgttttctgggcaggacatgggtcagttcctagttttccggtgatttttttcaaaggtgagtactattgagccacaatggctaagggcctctaatcttaaaggggagctatatgcataaccttgggggttcacctgtatttaccaggcgggaactactacagagcaaacgaggagaccagaagaaaccaagaaagtacaaaaaacagtgaagaaaaggggagggagggaggggtcggcgccttaaagagaaatgcctgatattagatatttctaattaaatcctagaggagttttgtttactcagaagggtttgttgttgggcttcttgtttgcttagggtagtctgtgattgcctcaaactcctggtggtagagttgccccttggttctagctcttgaatactggaattatgggcatgaaccccccccaccccctcgtgtgaaactagctactgttttgagatggggtttcccagtatagcccttgctgccctggaacttactgtgtagctgagggtgacctctaaccctctcctgcctctgcttcctgtgcaagaaaccacacctggcaacgatatttaaattagggaaggattcatttctcagcatgatgccctctagcaagaagctcccagggagcatgtagtagagaaattgagataaaaatcattcgctctagctaatgaatgggggggtcgctcctcggaggatccggcttttgggaaggatttgtgttaggtgtttggggagaagtcttaaacaataagctctgctctctgaaggagtctagaaggacagtaaagctgtgagtagcaatggtgaggcagcctctccactcagcaggttagtctgctgtggctttgacaggagtcatgtttgacctccatttagagatgttctgtaaaattaatgtttttatcagagcaccaaagcccagccaaagcaccaggttaactctggtgttcgggctgctttttcttcacccctcacatccttcaccctgtgcctggatgtgctgctgcgttcactgatggacgtcatagtaattatgaagtagacaaactaattactgcaattggttgtcagataggagggagacctttggggcagcctaattttggaagtagaatggttaagcattagtgctgagaaagcagctgtaaagttaatggtttctgagatgatctgttcagattaccgaaatcatcattatttactgcagtttttctctttgggatattaataaaatctttattgttcaggactgtgccacactgtaggagatgtcaggcctgacctctgctgaggggagcagacatgtcactttacctctcagcatctccagtcaccatagtgaactcataggtgcacttccatgcacttgtacttgcacttgagaacatgtgcatagttgaaatgtgtgagccctttatttcaggagtagtttatttgaggtttgggctgctagatatgtgttgactctgttggtcctcatggccttctatcctggctggatctttgataggcattacagtcagtaccaggattactgttgggtgccaccatgccagctgggcgttgttctgttaaaataccagcacctgggagaagttgggggtgggggatgggtatagctcagtgtccaagaacatacttatcatgtgtgacaccaataccaagatgaaaagccagacagtagtagcacactcgcacactcaggaggcatggaaaggtggatctctgagtttgaggccaggctggtctacagagtgagtttcagatcagccaaggctacacaaagaaaccctgttgaaaagaaaagaaaagaggaaagaaaaattttcctgtgactttagagaagttaaagtttgccctggaaacatccaggactatcctgaagtgtacacacagggctatattttcctcttctaaaagagaagagaaactggcctagaatttgggccctgactgccttgattgtcagaattctttatattaaaccatagttgtcagactttttcactgaagcagccctagactgacagtcctgggccagtatgaagatttcctgaagttctgagataatattaccgtgagccaggcagtggtttagcatgcacgcctttaatcccagcactcaggaggccaaggcaggatggctgctgtgagaatgagattgtggtggactgcatgatgaggctagcttagtccaggctggaggggaactgttctcaacttaaaaatatatactagatatgctgtttataaatacatatcctataaatgattatttgagctgggtagtggtggcacacgtactctggaggcagaggtacacagatctctgtgactttgaggccagcctgttctatagagcaagtgccaggacagccaggactacactgtgaaaccctgtcttaaaaacaaaattaccattgtattgttacaaaaatatcttgtttctgagaaacagataagtatttgaagctcagggttcaattctcacacactgaaatactctgttggggtgtgaaagtcttctctcatctactgattaaatggctgctaccagaagatgaggctctggtttcttgtagaaatcaaagcaccaaatatatacatatgccaccatgcccaacttttgatcattcatgtgtattaaaattatggacacagcataaatattgaagaataaggaatgtattcattaaatgctagtgagcgtaaacagtaaagtactttgtggccatgagaaactgaagaaagctgaaaggcagagtggcgtgcatctgtatctctagcacttgggaggtaggatcaggagttcaaggtcatctgctgtgaggctgaagctacatgagaccctgtatcaacaaagaacccgaaagtaagtagggaagaccagcactgggagggaagaagcgggcagatctctgagttcaggccaatctaatctatatactgaattctagtacagtcagtcagggctacatagtgagactgtctttaagacaaaatcaaaaactagcctgggacaaagtaaggttaaggccaggcccagagagtgtaactgagtatgccccgccctcccaaatgtatagaaataccaggagaccctggttcagaactgaacatacacaaagtatggtgcccctgtgtgatggttcagcaggggagggcactgggtatcacgtttgatggagtgtaatcactggcactcactggtagaaggggaaagctaactccttcaggttgccatctgtcctccataggtatatcacactacgtaactgcgtgcttgtacgcataaacacacccacaaataagtatgcaatgtatgaccagaaggcattatctatgttaggttaattgaggtggaaaggcctaccctaattgtgagctaggatacaggacagaataaaaagaagctagcattcatctctgcttcctgaccgtggctgcctcaagctcttgctgccatcctcttccttcttgatgagacagagtctgggaacactgagccaaccctctaagctgctgctgagggccagtttcttagagcaggaggaagacagatggcaaacacagcctgttttccttcctggcccactgtggaactgtggtttcctttttcgtctttgctctcccctttacttcctattgttttggtttgacttttgtttggttttttttttgtatagccttagttctgcaactcactctgtagaaccaggctgacttttaactcagatctgcatgcctttgccttccaagtgctaggactaaaagcttggactactaccacccacctttttaatgtcagtatcaagatctcgatcaacatgtgtgggtgtggagatcagagggaaacacccgagggaattgattctctcttccaccatgtggttatcgggggggggggggggggggatctcggcagtaggtggtttacccactgagccaccctgctggcccagaggtgtttatcttcttgtctggaaaaccagcttaaatttgctctcctttctgtggtagatttcattttagaaagagtattgcgtttttagtaactgtaaggttctctttcctgaaagcctttgtcctgggtgtgcatttatacgtcatcacaccctcacctgcatccattgcttataatcttacattttccccagcagcagcctctgcatgttcccccctgtcctggaagggatcccagtaggttagtgtggagtggccccatgctgagtgtatggctgggatctgcatcagagccacgcccttgtcagtgtgaaaagcaactctgtgccaggttacccgcatccccaagcctactgtgacgaggcagtatgttctgtcccacatgaggcactcggtcactcgacaagtacggaagtgaagatgtggatagatatgattttgattgcctaagcactctacatttcaaatcacttaagttttttaaataccctgcaaaactaatcgataaagtaactgtacactactattttaaggtttcttttacttaatcatgtgtataggtataagtgtgtgtatgttaatgaagatgcctatgtaggccagggaagtagatcccctctagagctgtagtttcagatacttttgagccaccttccataggtgcttagactcaaggtcttacagtacatgttcctaaccattgggctctctctaggtgtatgccattacattttgtgccaaacctttgtagtaccgataaatatgaagaggccatcgaggcagctgagtgggcaaaggcatttgcctcttgagtttgaagacatctggaacccacagtggaaggaagggactgaccccatgttaagcctggccaaaatttagtacaagtctacagcacctggtatccccaggtggtctcccatccaagtactaaccaggcctgaccctgcttagttgatgagatcaggtgagatttggcgcattgagggtggttgagattcctgctgggtttggtagcacatggtttacataatgaattccaggccagtcagggctacagtgagaccctgtctccaaagtaaataaatgctatgcatggtggtatatgtatgtacttgcgaggcagaggaaagtggatctctgtcagtaggaagccaactattctacatagttcctggcttgctaaggctgcacggtgagaccctgtttcaagaaagaaaacaatgaaaattcccagggtctgctatatgataggctctaatcgaactctccacggatgacttaacagtgttgactgaattaaatcgacactattgttttatgtgccccttctctcttgcagctctttgtcgtggatgtccagacaggccagatcaccaagattcccattctgaaagaccgggaacctggaggtgtgactcagcagggctgtggtatccatgcaattgaactgaatccttctagaacactcctagccactggaggagacaaccctaacagtcttgccatctaccgcctgcctaccttagatcctgtgtgtgtgggtgatgtaagtgtttcattggctgtagttagtttcaggtttctcctgatacggggatgaggggtggaagagagcagagtgggtggacattggggtcccataggtaagaaccagcacatatgtttgaagaagggacaaaatgacagatccctgtggccaatagtgggctgtttttcaatttagagggtccacatttctctcagaaaataaacttaccgatccatccatagtcaggtattgttttggctccagaagtatagcatgaatgaaattaataaagcccttgcctgcagtatagtgttgagtggtctctgtgacatgccagggtgacatgccacagaggaggggtacccgcaggctaaggggatggactcttaagcagcaggggagcactgtttcagagagcaaagaaagctcagtgagaagacatgtgaccagggccccttaaaggaactgtgagcgccagccatgggagtgttctaggcaggagacggggctccagggtagaaagctggaagccctgctctctggacattttgtttttgttgttggtttggggttttttgtttgtttatttttgagttttggttttttgagacagggtatgtagctctggctatcctggagctccctgtgtagatcaggttagcctcaaactcactgagctcctgcctcctctgtgctgggattaactgtgtgcccctctgggcattcttcctgtctgcacaactgccaggcgtattgtacctctgattgtccccagatgttatgaggtctgacctcacaagatcatcagaggcccacgttgttctttgcctgctgttgctttacattcatctgtgtgtgcagatgcacgcgtggaggccggagcacactgagaaagtcagtcctctccttctgtcttgtgcggtttggggatcaaactctggccatgagaggtggcatctgtcagtcccctttacttgctgagctatcttgctggctctgtttgttcagcaccagggtctccatatgtggctcatgctgtcccagaacttgcatcctcggcctcagcttcctgaattacaggatatgcaaccatgcccttccatacttaggatttttaagatgcattttcagtcagaccagcacgcttttcagaagacttcaccatggcccttgtttgactaacctctgttgttgtttgtgttttctcctctctgtacatgtcacttacccctctaaggatggacacaaggattggatcttttctattgcgtggatcaacgatactatggcagtgtctggtaaagttgcccttatttagggagatttggtgtagcaaagacaagtattacaaatgatcctgtggtagaaagtaaccatgaaagctcctgggccaaggtgcccagtcttgttacttgaatttactcattagctaggtggtccgaggttgaaatagggcatgcatacgctgacggtgtgcccttaccattcagtttcatttcccagactcccctacctcgtgcacctcatgctcctcaccactactgattttggggggcggaacagggtatcactttgtaaccaaagctggactagaactcatatgtggtctatactggtcttgaacttgtagcagtccctctgcctaagctgtttttgttgtttgtttggtttttttttttgagacagggtttctcagttttttggccctggctgtcctggaatggactctgtataccaggcaggcctggaactcatagatccacctgcctgtgcctcctgagtgctgggattaaagggctgcccagctctgcctaagaattttaagtgttgatactcttaagtgtacctactacacccagcttaggagattttgtgtgttattccaccttatatttttaattgattgattattttgtgtgtggtatactcatgccgtggcacatatatggagatcttagtgttagttctgtctttctttccaacccttggaaggcaaaaggaggaagatcaggagttcatgggccagcagtgtgctctgcagcagcactttgtaatacattcagagaaaagttcaaaggaaagtttactttgaatgcatgagatcctgggaatggactcagcgctgcgcagggcctctagaaaagaaaacttgttgttccttattgcttatttgttaaggaaaataatttgagttttgtttgtcatttaaaattgaactcgggagccaaagatggtggggcacactttcaatcaagcactcctagggcagagacaggcagatctctgtgtttgaagctagcctgttctacagagaggtccgggatagctagggggtcagtgatgtcaaaacaatagctcaagtccatgtgctcagacaactattctacttctgaattatattcccagcaccaagaaagacacttttttatatgggatcttctcacatagctcatgtttacctcaaattggctatccagctaaggattgacattgaacacctcccaaggacttggatcatagatgtatagaccatcataccaggttttacatgataactggggattgcacctaggacttccatgcatgctagacaagtgctctatcaagtcgtagccccaacactaagaatttattcttgaccaggtatggtggtgcacgcctttaatcctacactcaggaggcagaagcaggcaaatctctttaaattggctatggacttccctcgaattgaatataaagagaagtttctggaggaaaaagtataggaagaaatctgaactaagtaccatggctcatgcttgtaatcccagcactcaggaagctgaggcagacatactgctgcaggtttgaggccagcctaggttacagagggaaatctgtcttaaagaatacttcagtgtttggggtgggctgtgtagccaagcctcagtgtcaggctggatgttgaaatgaaaggcctctagtggtcttctgtatggttgactgtggagggtcacttatagctgacatctgtgaatgtcctacactgcaggctcacgggatgggtctatgggactctgggaggtgacagatgatgtgttgaccaaaagtgatgcaagacataacgtgtcaccagtccctgtgtatgctcacatcactcacaaggccttaaaggatatccccaaggaggatacaaacccggacaactgcaaggtgcgggctttagccttcaacaacaagaacaaggtatgaactcgccaagggattccagcagcctgtcccttctgactttatccttcccctccaaggcagtgcttgctgtgtaacttggttttaaatgcccagagtgtgtcttgagaggccgagggatgctggtgagcggttacaactgaggccgtgaagcccagcctgtgtctctgctgtatttgtctgtgtagagcatgtttgtggtcataatttcccgggaccactctaagctgaccctgcttcatttgcatgtgccttttcaggtgctctgttttgggtttgatttgcatactggccttgtttctaagctccccattttgactgccctctttatctcacacctccaaccgatcactgggtgaaacctcctgacaagtgaggagggtgtaagcagaatccaagagtggactcagagcccagagaggagacaggcttctgtgaaatctaaaacggacacaatttgattcatttaaaaaaatatttacgggctggtgagatggctcagcgggtaagagcacttccgaaggtccgaagttcaaatcccagcaaccatatggtggcttacaatcacccgtaatgagatctgaagccctcttctggtgcatctgaagacagctacagtgtacttttgaataataataaattttttaaaaatttacatgtatgggtgtcatgcgtccatatttgcatgggtgtatgtgcatcacatacacaagggcccaatttgaaaggtggttcactagaagtaggtttctctttgcacctacacaaaagcagtctttcacctgcgctgcgctctaacctgcttagggatgtcaggaagataaggagcgcagaaaggactgttttacccacagatgtgtgcctgtgtgcttgtggaattgcatatactgtgtaacggcggcacgtgggtgtgtgagagcttatcatctctggcatccttgggataggagggggtgggggggagccccagctctcagcttcttcccctgtgtagtctggtgcttcagtttactgcaggtcatgtggtaacttcttttctgttgctcttgtaggagttgggagcggtatcactagatggctactttcatctctggaaggctgaaaataccttgtctaaggtgagaacatgagttggtagttctatataatttaccatagggctagaatactgtctttctcccagagtcatagtggatttgcccaaaacaccttttgcccaaggtctggggatagaattgtgaagaacatgaagttatgagttttaatttggggctggtgagatggctcagtgggtaagagcacccgactgttcttccaaaggtccagagttcaaatcccagcaaccacatggtggctcacaaccatccgtaacaagatctgactccctcttctggtgtgtctgaagacagctacagtgtacttacatataataataaataaatctttaaaaaaaaaatgagttttaatttattccagtctggccttaagcttgttgtcttctcgcctctaaagaacctctcaaagactggaaaatactgacagccaccgcctaagcaagcaaaggcctttcttttagactggctctcagtacagacactctgaatgcactaacccaggacgcctgatcctctacctccccactgtagcaccaaggaggccttcagagaggcctcagactgcagggtgcctaggaaagttgccctttgtattagtgttctagtccacagcatatttaagcactggtttgtagagtgactgtctggtaaggttgtcaaggtggaaaaacctgaatgttaggaactcctggcaactgaaaattaatcaaactaaaatagtctcttaatcttgttagatgatgagaaaatggagtggatttttgttttgttttgttttgttttgttttgttttttttgatatgctgtttctctgtatagctcaggctgtcctggaactggttcaggctagcctggaatttggaaattcatctgcctctggcccctaaacactgggatcaaaagcatacaccactatactcagtttgggtttttgtgttgatgaggtcatactatgttagcaaagctagactggaattctataatccaggctgccctcaaaccagtgatcttcctgcctcagcctcccagatgctcagattacaaatgtcaggtgccaccccaatggttttggggttttgtttgtttgtttgtttgtttaagatttgtttattttacatatatgagtgcactgtagctatcatcagacacaccagaagagggcatcagatctcattacgtgtggttgtgagccaccatgtggttgctgggatttgaactcaggacctttggaagagcagtcagtgctcttacccattgagccatctcaccagcccaggaaagtcttttaatgagacccgagattgcaacagcacagttaaaaaaaaaaagatttatttataatacttgctagcaacgtttttgtacagtaaagtcttcttcacgtcttgcctgtgctacttataacatctgtaataagctttttgttgggaggagataaggctcagggaattgacagtctcctgtgtcacggcagctttgcgctccagtaggcttgcaggcagagactagactttctagtcctcaaggatcaaagatgaaggctgcctcagtttacctgggatggagtatactctctctggcttacagagggctcagtcatagaaataaactacagttcttggcttttcctggcattctgataatttgattcctgttttccctttcccctaacccagaagttactagtttactaggctttgtcttgtccctgacttaggtagtttgtgtgtaaaggaagcctacagatgaaggaacacaagagcagtgcccattttatgttatcgtgaatgtgtgtatcttctctattcagctcctttccaccaaattgccatattgtcgagaaaacgtgtgtctggcctatggtagtgagtggtcagtgtatgcagtgggctctcaagcgcatgtctccttcttggatccacggcagccatcgtacaacgtcaagtctgtctgctccagggaacgaggcagtggtaagtccctatgtgttcctgcaggcttatagctacattgaaatgggttttcacctttttgtttcttcttagatttgcaaacaagatcagggactcctgtgtaacacttagaagtatttggtaacagaatagaggaacttagttacctgtggcaacagagtgtccaggctgtagaaacctttggttcaaaccactgtgaggagataagcagtgagcactagtcctccagaactagcctgagctaacgttcttccaaactgagtaacactggattggtgcggggtggagaatcagaagagcgtgagatcacttttggatgtgatgataactatgtacagtgtacggtttgacaattatacctcgagaagccaaagaaaatgcttgttttgttctgaggagtaagtggggaatctgcttgcgtgcaaatggcctgcctctgagctgcacccgttcccagcctctgcccagatttcgtattctaagggccgtcgctcaccttcctctgtggaagacttgtgctgctgttgtctctaaggcttcagagtcctttgttctgatgactcattttctccctccaagaatcctgtgtaagaaagcagatgagacgagtgagtggttaagactgctgactcggaggccctgagtgcaggctccagttcccatatgaaatgctcacagcagcggggcgtggtggcgcacgcctttaatcccagcattaggaggcagataggaagaggctagcctagtctctacagtaaattccaggctcatcaaacagggctgtgctgtgagactgaaccacagtgcttaggtaagttaccagatccaggagccgtgaaggtctgaagaccggccaatctaaagttgctttttttctttttctctcccctttctcatatcaaaaactgtagctagccgggcgtggggaggcagaggcaggtggatttctgagttcgaggccagcctggtctacagagtgaggtccaggacagccacggctacacagagaaaccctgtctcgaaaaaccaaaaaaaataaaataaaataaaaaaacaaacctgtagttatcctgggagtcttggaaggaacattaggggttacagtgtagcctctttttctaaaagtgttatttctgtgtagataacacaaaagcagtttttgggtttgttggtggcggcagtgtttgttttccccgagtattgctatggaaggcgggtaccatgctgctgattgaaaggcattggttctctccttcaaaggagtcacaggaatcaaagtcgggtggttgcttggtagccagagccctttaagtggtcaacatatgtatattttatgccagagaacagcggatatattgaaatctggggctgcataatggtgtacagtgaaaagttttaaaaggttttatttttattaccatcatcattataattgttttgtttttgagacaaggtctcagtaggcatccttggctagcctggattttggtgtgtggaccagactagccttgaattcacagagatgtgcctccccaggactgggattaaaagcatacaccagccgggtttggtggcacacgcctttaatcccagcacttgggaggcagaggcaggcggatttctgagttcgaggcagcctggtctacagagtgagttccaggtcagccagggctacacagagaaaccctgtctcaaaaaacaaaaacaaaaaaacaacaaaaaaaaaaagcgtacaccatcatgcctggcttctaaaacgttttggttactattaatggatgtagtttgggtaaagaaatactagttcacaaaagtccctagctccacacagatgtcaggaggctcctgtatccattgtacttaatccacaggtacagcaggtgtattttccctttcatccaaagaagatggtaacttgttgtaaataacagtcctgtcatgctggtaatatgaagagaatagtgagctacagtgtacgtaatgtaatggagaagagctaatagttgtgaaaggtgatgccagtgctattggaggcatagcaccaagaacccagacacacttatgttctttggcacaaaacaatgtagattttcccagtaatctggctcattagcagagagttctgcttaaccattggcacagtgccatctgacatttcgggtgtacaccctctaattgctctgtgtttttctttctcagggattcgatcagtgagcttctatgaacacattatcactgtgggcacagggcagggctccctgctgttctatgacatccgagctcaaagatttttggaagagaggctctcagcttgttatgggtccaagcccagactcgcaggggagaatctgaaactaactactggcaggggctggctggtgagtaagcccagacctgagaggatggttgcgtttcagggagggattgtctaccctccagtcttccctcctcgattttttgctgttggcattccgtagagcagagaaaggctccgtccctgactttgcctttgtgtctgcacactggctccaggggaggaggaaggtggtggggcagatgtttgtaatctcggctctctgtaaactggaggaggagggtggcaaaaaagtgaaaggcctagaaaaatatgctggtgcctcagattttctccaggtgacagcagagcaggaaggctaaggaactgtctgccattgctgccagtgagttatcattaacaaggctgactcggaaaagctgtcttgggaagacttgctttcatgtaacaattctttttttttttttttctttaagtatagactagagtttattaagggcatggggaggggagttaagagggtatagaggcagagaaagagagagtagaggagtagaggccggccatgaacacgtggcgggggggtgaggggacagagggggagcaagaaagcaagagctcatgtaacaattctttatctggtaaaaatgaggcccgtttccttgagaaccagttgtgtgatggcgggtgatagacctcctgcctttggcagagaccagaaggcctccctgtcccttcttactctttcctagaggtactaaccgtctcctcatcttcccacagaatcatgatgaaacctggaggaattacttttcggacattgacttcttccccaatgctgtttacacccactgctacgactcgtccggaacgaaactctttgtggcagggggccccctcccttctgggctccacggaaactatgctggactgtggagttaatgacaactaactttctcccaaaatgcagatttacactaacttccaccctcagtttccttgtttgatttccctagctgtggaaggctctcctgtctatgcaaacagagtttgcttgtgggtcaggcagttactaggaagaggctctatgcagaaatccaaaagctgggacgttctacgtcagttggtggcttgttgttctgggttttttgtttgttttcactttgcagtaattagaattttacttttcccttttctgctttttaaagcaaacactgttacaatccctttttattttttcctctccttcctctggcttctttacactgaaatgacaaagtcattcttacccttacttcactgaggtagggcccctttataatcgtgtggtggctgtccgactttctgtgaaagtgtgggagcctttgtgtgcgtgtgtgtgtgtgtgtctgtctgtgtgtctgtgtgcgtttgtgtgtgtgaacttgtgtgcctgctggtactgcatcactgatactacttggaatgaggattatctgtaattaaagtatttataaaagaaacaactttactcagagtccagctttgggactagcctgtatcttctttaaggtccgacattgtaggaagagaaacagacacaccaggaaaacccttgagttagagaagccggatgggaggggaggctgcatcccaggactccaaactgtccaggcctacctgtccttccacccacgcaggaatgcccatgtgtgtgttacttccactcccgacctcctgtctgctcgcccagactggggactgcaggccacatcacagcctagataaagacaatcctctccccagcctcctgcctctgacagggtctgatctgaccgagagcaggcagtctcgagcttgtgtgcttactgctcatgacttggaggaggaacttttccattcttggggttttgctggtattttctaatttgtctgtccaggaaggtgtggtttgtagcgagtgctttgtgtgtgggatctgttctcagtgcagcagggcttagtgttggaagtcactgtcctgctctgttggctcattcctagggtagtgacaggtggctgtgccagcatcgctgcatgtgacagtgtagctgtgattggtaatttgcttgtttctctcaaactatttagtgtgaagagttttttgttgttgtttttgtttttaacttgcaagccagttgttgtcttccgaacatcatgtggaaaggaagctctccccaccctagtaccctgagacacacagtgctgcctgagaaatgcagtcatacacctgcacccagtttctcagttgctccccagttcttccatgctctctttgtgtcaaatgagtattctcataatggctggggctgctggggagggaagcggcaggcccaccgtaggacacagcatcctccacaggttttagaataatcatcctataatctagagaaataggtgctatcaacaggaaattaagcaaaatgctggatgctgtgaatcttttgtcttaatttttttctattcttaaactacaggctgtagatgtcttagttctcacagaacttctgtctttttaaactgacttgtgtgtttaagtaaacaaaactcttgtaggatgttttgtgccattgccagtccgtctcctgtgatgcttttgattgtcttgagattttctgtttttaaaaatgtagcatttgacttttttgccaaggaaaaataaatactatcccagtgcagagctgtttgagtgactatatatggcaaagatgctgcagggagcagacccgaaggattggtgagggcatgctaagatttttcagagttacctagaaaggcttgctcctgcttcccggctctaggctctggggtgcaactgagggcccccgtgcctagagcaagtagtgtagtacctgaaagaaacaagtggttctggggccccgtctgcttcactgagggtgtcctgagagtgactagaagtggctgcatagtggcctttcttgcaattaagaccacactgaatggtcttcccaatgctgggggcttgggagaagactgctaagtcacacgaccaaggctttccagggcaagcaggctgtgctgatctttgcatttgctcagaccaaactcacactgggaccttgataatcagattgcaaaacagaagagggtgggtaaattagttaaatcaatttgagaatatgtcttacaaagagtgacatttggacaggacctggaactagccttaacacaagttggagtacaagatctgaacataatattccattgtgtgggggaaataaacagatatcaggagttggagagagacggctgtgcagttaagagcatttgttgctcttttggaggacttgaatttggttcccagcacttacatggtagttcacaaccatctataactccaggggatccaacaccttcttctgaactccaaggccagcgggcattcatacatgttacatacacatgtatgcaggtaaaacactcatgaaatcacctttttaaaatgaccactgatggcccagagagatggcttcagcacttaagagcacctggctgcacttccaaagaactagggtttaagtccaagaacccacgagacacaactgttatctccagtcccaggggaatctgtacttggctgtgtgttgcatacatgtgatgcagaaacatacatgcaggcaaaacacttatacacataaaaatggtaaaatgctaaaaaaattttttaaatgacttgtgaggtgaacttggcattgtgctcactgtctaggcaaggatgactttgaaggccttattttcctcaccatggcctcctaagtgctgcgattaccccaaacaaggcggctatgtcactgtaggacactatggaacatgttcagaaagctgatttagcagatgtgccgtggacttgccctggacctctggcctccatggaatcttggccctcttctccttttccagtcagatttagtagcaagctacataccacagaggggctttgtgggttttatggcgccctggccctgccagcagcccctcctgccaggccatgaaagaatctcctgttcatttccgagccacgcgctgcctgcttcattcctcaggagctgctggctcctcctgtcatcccctgggttcttggctgaagagaattactagctcttcaatgttcactaatgttcctgttcctctatgatttgggggttggggggtaggccatatccatcgtggtcagagcacaggctggccttgaactaatctacctcagccccctcagagctggctctcaggcatgaactaccacacctgacagagttaaggatttcagagtctaatactcatcacctgagctcagcatgtgttttctgtaccaatcattaactgtgtatagatctgtaattaacatcctatgctgcagtcaggaagaaaactcaactactgccttctgtgacctccctcacaactccccagtcagaggactgggaatagtgaatctagtgctaagatttagatcctaagtggccccccaggttcacttggtagagacttggtcccctgctgatagtactcggttgagtcttctaggaggtgacagaaaatggagggaaattagagcactgggctctgtacttgaagatagaggaccctctcctttttctttcttgtactctcaaatctcctctccccagctgggtttcttcaacacacagtcccagctatgaagttcagttttgccacaggccctaaaacaatgggaccagctacctataggcaaattacacacacacacacacacacacacacacacacacacacacacacacacgaaaacctggagggaaaaaatgaaattaataaatgaataaacaagtcatggtgttgccagtagtgcttgcttgagagatgggagcagaaggatcaggcgttcaatggaagtctcagctgcatagttgaaagtcagcctagctacatgagagcttgtctaccccccacacaaagataccaagaagactggacacaagagcacactcctttaatctcagcactcaggagtcagaagtagactgcattggaggctagcccgggctacagagcaagaccccatctagtacaacaaaacaaaaggcgtcacacataaatgatttatctccagtattttgaggttcggacatttgccaatagcaaagctgatcgccttggtgtgaggtatggtgcaggtttgggtcctcagtgtgttccctgagtaacatcctcataatttttctgccctctagtctgctacagtaaaagtgatcatcatgtagagtgcatgtttgtttgtttgttttggggggggggttggtttttcaggacagagtttctctgtgtagccctggctgtcctggaatttggtcttcaagttagcctcaaactcagagatccacctgcctctgcctcccaagtgctgtgactaagggtgtgcaccaacaccagcacccagctagagtgtattttaaggtactaacacagatccctgagaaaggacccctgctcctaggtgccatctgccaacactgagtatgaatgagagagaaggggctggttctagctgtacagctgcttagggctgtggactcaaaatgaggccctgcactgatggggtgtgtgtggcgggggacggagggatactgttgtgtgaatgtgtgtgtgtgtgtgtgtgtgtgtgtgtgtgtgtaagcatgtgtgagtgtgtttgaatgtgtgtattagtgtgtgtgtgagtatgtaagtattgtgtgtatgtatgtgtatatgagtgtgtgtgtgagtgagtgaattagtgagtgagtagaaaaagcaaaatatagagaattttcctttgatttctggggattagcaggtactctaggcaggcgtgctggtgcagatggatctaaggacaggtgtctagtattagccagacaacaacactacacagtccatgtctgtaaataaggaaatgaccacagtacttgtgggtcagtgtcatcacaaaacagaccagcaactagatatggtggtgcacacctgtaatcccaacattgggaggctgaggcaggacgagtatttacctttgggtagctacacagttcattgggcaacaggaaataacctcaaaaaaaaaaaaaagtagctttgtatggtggcatatacctgcaatcccagcactgaggagacaggctcccagaagttttgaaactagcttgatctacatggtgagtgctaagccatatagcaatactttgtctcagaatcatacaaacaaaaaaaacaaaaaaaaaaaacaaaaaacaaaacaagggctagagatatagcccaattgtaaaacacttttgtctggcatgtacaaggtcctgaatttaatccccagcacaaacaacagaaaacaaagaacccctccccacaaataagccaggactatggtaattctagcattagagagactgaggaaggaggactgagttgagttcaattcttagtacctcataccaggtaagtggctgacaccagtttgtagcctagtgcacataggcaggagaatcagaggttcaaggtcaactctggaggcaggggctgcggaatcttttaagttttttaatcttttaatcttttaagacacccacagtgatacacctactccaacaaggccacacctactccaacagggccactccttgggccaagcatatacaaactatcacagaaggataaccagcctggtctacaaagtgagttccaggacagccagggctacacagagagatcctatgtgggaattaaaaaaaaaaaaaaaaaagttcaatgtcatctttggctccctctttctgtctctgtctctgtctttctcctattccctcttctctcagccaggcatgatagcacatgccattaatcatcagaacttgggaggaagaggcaggaagatttctttgaattccaagccagcctggtctacaaagagaacccaaggcctgtctcaaaaacaaacaaacaaacaaacacaaaaaaatacagtcatacatatttatacacatagcagaaacctaaaatatcatctctagatttgtccatagttggtatctgggcaacacagacacatttgccaaccttcagttgggtgcactggcaaatgccagtaatcccagtattattaattatttggaagagacaggaagattgccatttgttaggtcaacatagacaaaatagccaagttcaaactaatcattagcaagaccctaattctatatcacagaatgtggaggaaggagaaggaaaggaaaaagaaaggggagtttactgtacttcaagggtctctttgagaagctagatagtctgtttagccttgtgtgaccagagaatccatcacattcccagtagggggagccagaacttagccaaattctaaacgcatcactcttgactcaacacttaggaagaatgctaaagaaatcgtgcccccacagatccattataaaactttgtttcaaggtgcacctgaaccacctccccaaccttccaaaccccattgttaggactgaggagggacgaggcaagcagagctatagtacttcagttattactgaagttctcagagctgtaacccctaaactaaccttccctatgatttctgtatagattggtgtataaaagcatgtatatgcacacaacttcacaaaaatgggtatttaaagctgtctgggaagcctggtaagatgagatatgcttataatcccagaacgtaggagcctgaaatggaaggtgtcttaggattttactgctgtgaacagacaccatgaccaaggcaactcttataaggacaccatttaactgggactggcttacaggttcagaggttcagtcctttatcatcaaaatgggtacattggcagcatccaggcaggcatggcacaggcaaagctgagggttctacatcttcatctgaaggctgctagcacaatactggcttccaggcagctaggatgagggtctaaaagcccacacccacagtgatacacctactccaacaaggccacacctactccaacagggccactccttgggccaagcatatacaaactatcacagaaggataaccaagactttgaaaccaatctgtgctatctgtcttaaaacaacaacaacaaaacaggccagcataaaaaacacccagagctcatgtaaaggtggaaggagacaaccacagagtcgtcttgtgctctctgcatgtggaccacgtcatgcatgagcctacacatatcacacacacacacacacacacacacaccacaacatgccaggtgggtactagggatgtagctcagagctagagtacttccctaatgcccagcactgtaaaataataatgacaataagaaaataaagccatatgtatatttctatgtaagaaatgggctgttacccacttccgtgaatgaaattttacagaagttacattagtggcatctcctagtcgttggagtttgggtgatgttcctgtattctgtttgtttgatttgggttcttggtagttttgtttgtttgtaaaggatgataagttttcaatttacttaattaactgtacttatttattgggggtggggggaagggtgtctctgcacgtgtttaggtcacagggcaagcggtgggagtcagttttttccttccattgtgtaggtcccagggaactaactcgggtggtcaggctcagcagtggacgccttctgagcccctccccctctctttgggggtgggggtctcactgtgtaatcctgtctggcctgactcactgtgtagaccagcctggcctctaattctcagagatcctccttcctctgcttccccaagtgctaggattaaaggtatatgcacactctgcctggctttaattcagctttttaaaataagtttgcactataaatgggctttgaagttgtcaatctcctgtctcagtctcccaggtcaaccatgcctggctctaggcagctggtcaattctaaataagcagttcattaactaactctctctggacgaatttgaccttctttgatcaagtaaaggagtaaggcgttcttcaggctttgaaggaccagagtcatttactgcgattttatactggatttacagtcctggggagatggtcgatctctttcatctgaactcagccagaataaccacgagcaacgaggaagagaggcactgattagagataacttcaacacacagcttcaggccctcgaggctcccaccaggccattagccaaatgctgacctggagcctcataattccttccggttggagtctacactgtataaccacagtaaggcgagagagaggccagccacgaaagggacgtaagtggcttttctataggactcagggaactcagagcaacctggaggaagaaactgaaaacccattgtctcagtaactctgaggaacgaagctgtcccataggaatgaggccctaggaatggaggaatagaggactcagctaccactgtgagctccgcagaacagggcaaaaaggcaaccacagttttgcccccggggactacagcactaaaagatccaattgggctccatttgttttttgagatttgtgctagtgtgtgtgttcctttttgtgtctcctggacctctgtagctggctgggactaaagttgaaaggagcattcagtagggctcttctctggcagggcaggtccaggcctgtagaaactggtttaacctgcttcccagagtctcattgccacttaagtaatctcacgaagcagaagcagaggggctctgggtcaagatatagccaaagagatctgttttgcttgcttgtttgttttgagacagagtttctctgtgtaacagctctgttgactaagctggcctggaactgacagagatgctcctgcctctgcctccctagtgttgggaataaaggagtgcaccaccactgcttagcccccattttgattcttaatctctctccctcctgttttgaactcctgagctcaaacagctttctgccttaggcctttagcacgatagcaggctagagttaatttttcctttcctttttattggagattcaaacccaaggccttatgcatggtaggaaagttctctacccagctccatttcaaatccttattttcattatttttaaccatgtatatgtatgtctttgtactgtgcatttgaatgtgtgggttcctccagaggccagagatgtgggaccccctgtagttggagttacatgggtcctgggaattgaacagcagtatatatgctcttaactgctgagccatctctccagccctacctcctccagtgctgtttttagtttgaattcccttgaattgtctcttgaagaaaaggtttcctgtttcctccaccaaggtttgaggtgggacttgaacagccacagagggtcaggcttgcctactgtagatttggatatccctccctccctccttctctctctctctttctccccctctctccctccctccttctccctccttttttttgttttttttttttttgtttgtttttttttgtttttgttttttttaaagacagggtttctctgtgtagccctggctgtcctggaactcactctgtagaccaggctggcctcgaactcagaaatcctcccaagtgctgggattaaaggcgtgtgccaccacaccaggctttgatttaggtttcttgaaggcagggtctaagctgttgtttaaatatctatcaatctctatatcgaatctatctatcaacctatgtcatctacttattatctatctctttctttctttcttttttttttttaagatttatttatttattttatgtaagtacactgtagctgtcttcagacacccccagaagagggcatcagatctcattacagatggttgtgagccaccatatggttgctggaatttgaactcaggacctttggaagagtagtcagtgctcttaaccactgagccatctctccagccctatctatctctttctattgtctatcaatctctatcttctagcaaactctgtcctctagctagggagctgctggtctgtaactaatcccgagtctgtaacccagcaatacttttgcctcagtttccccagtgctgcaattacaggttgtcacagtctgtctgcaattacaggttgtcacagtctgtgttggtccaggaaggcttggctccctaccctgcatgtttctgaagttttactgtatcttactttcccagaagtttactgtgttacacactctaaggccaaattagggtggtaaagagcagaagttgaaattcggcaggtggaggtggggacaagcctgggacagcagccttgggagtggaggcaaggccaggtgatggggaggaatgagaaggccaggaaggctgggcttatttatctccattgagtatcttcctgtgagttcctgcagacgtgttccatttccattggctctctgctcctctatgctgtcccctctggcccagtagcaatctagtctttcttccttgaaaaatggccccgaggtactgggacaaatcctgtaactttttttttttttttttaaatcaagctcacttcagttatccatcagtgtctagatattggtaggatgtcctagagatctgtgagtgagactttgggcaagctacccaactcctcagtgcttcggttccctcatatataaatattcccaggagaagacacagctgtaaggtaatatttggttctaagttggtaacaaagtgattttgttcgttcatttttgttgttgttttttttttttgtttgtctgcagtactgctaccaccgcctggccacaaggtgaagatttaactattagaggattcaaccatgaaggtctgggtatacagtgcatccctgtgaccccagcactctgtgcagaagcaagaagatagcagcaaattcaaggcctgcctaatgacctacctacaaagtcatacttaaactgagacactgacgctcagtagaagctgagcagaaggatagagacctgcaggccagcatgttctgtctagcaagtttaaggatagggttacataagggaacccccgtctcaataatataaagtaaaataaaataaaatgaagggagaagcttccctgaatacctgtcattgccaacatcggtccctaaatggcatcctgcacaggttgctacgcccagtctcaactgactgcacggagggtccacagttgtgtgtcctagagtaaccagtgacctatagctttccttgcgttaacaagttcagctgaggtctttaaaatgtttcacgaatttgtatttgagaagagacaacttgaaatagcaaaaatcttattaaatttttatttagtttttgtttgtttgtttgtttaggttttttgggacagggtttctctgtgtagccctggctgccctggaactcactctgtagatcaggttggccttgaactcctactgtatgtgtccttgagtgtgtgtgtgcattccggcatgcatgtgtcaatgtgtatatatacatcacatacatgtttatctacattacatatacatggttctgattttgagatggagtcatcttttaacgttttgtatatgtgtgtatgtgtatatgtatgtatatatatatatatttttttttttttgagacaaagtctctctacataggcctagc

SEQ ID NO: 839 - DNA, 3431 bp, Mus musculus
ggggcgcgggcgagtgggaggggggtgttttggttctcgccgctcgccgtcctttccagacacggcggtaggaaagctgcttgttcctgcttttccttccccttcccttccccttcccctttcccaacccggattttcccttcttccatttacgcgcctcattttgatcgactgctgcccgggatccgagccattttccgggccgggcgctcgaaagcgcgcggccccagggcccggttcatgacccgtcgccctgccgccccttgccttctccgcctcatgtggctgcggggccacggcggcgctgcccactatggcccggaaagcagttagcaggaagcggaaagcgtctgcctcgccaggagccgggagcgacgctcagggcccgcagtttggctgggatcattcgctgcacaaaaggaaaagactccccccagtgaagagatccctagtgtactacctgaagaaccgcgaagtcaggctccagaatgagaccagctactctcgcctgttacatggttatgcagcacaacagcttcccagtctcctcaaggagagagaatttcacctcgggacccttaataaagtgtttgcttctcagtggttgaatcataggcaagtggtgtgtggcacgaaatgcaacacactctttgtcgtggatgtccagacaggccagatcaccaagattcccattctgaaagaccgggaacctggaggtgtgactcagcagggctgtggtatccatgcaattgaactgaatccttctagaacactcctagccactggaggagacaaccctaacagtcttgccatctaccgcctgcctaccttagatcctgtgtgtgtgggtgatgatggacacaaggattggatcttttctattgcgtggatcaacgatactatggcagtgtctggctcacgggatgggtctatgggactctgggaggtgacagatgatgtgttgaccaaaagtgatgcaagacataacgtgtcaccagtccctgtgtatgctcacatcactcacaaggccttaaaggatatccccaaggaggatacaaacccggacaactgcaaggtgcgggctttagccttcaacaacaagaacaaggagttgggagcggtatcactagatggctactttcatctctggaaggctgaaaataccttgtctaagctcctttccaccaaattgccatattgtcgagaaaacgtgtgtctggcctatggtagtgagtggtcagtgtatgcagtgggctctcaagcgcatgtctccttcttggatccacggcagccatcgtacaacgtcaagtctgtctgctccagggaacgaggcagtgggattcgatcagtgagcttctatgaacacattatcactgtgggcacagggcagggctccctgctgttctatgacatccgagctcaaagatttttggaagagaggctctcagcttgttatgggtccaagcccagactcgcaggggagaatctgaaactaactactggcaggggctggctgaatcatgatgaaacctggaggaattacttttcggacattgacttcttccccaatgctgtttacacccactgctacgactcgtccggaacgaaactctttgtggcagggggccccctcccttctgggctccacggaaactatgctggactgtggagttaatgacaactaactttctcccaaaatgcagatttacactaacttccaccctcagtttccttgtttgatttccctagctgtggaaggctctcctgtctatgcaaacagagtttgcttgtgggtcaggcagttactaggaagaggctctatgcagaaatccaaaagctgggacgttctacgtcagttggtggcttgttgttctgggttttttgtttgttttcactttgcagtaattagaattttacttttcccttttctgctttttaaagcaaacactgttacaatccctttttattttttcctctccttcctctggcttctttacactgaaatgacaaagtcattcttacccttacttcactgaggtagggcccctttataatcgtgtggtggctgtccgactttctgtgaaagtgtgggagcctttgtgtgcgtgtgtgtgtgtgtgtctgtctgtgtgtctgtgtgcgtttgtgtgtgtgaacttgtgtgcctgctggtactgcatcactgatactacttggaatgaggattatctgtaattaaagtatttataaaagaaacaactttactcagagtccagctttgggactagcctgtatcttctttaaggtccgacattgtaggaagagaaacagacacaccaggaaaacccttgagttagagaagccggatgggaggggaggctgcatcccaggactccaaactgtccaggcctacctgtccttccacccacgcaggaatgcccatgtgtgtgttacttccactcccgacctcctgtctgctcgcccagactggggactgcaggccacatcacagcctagataaagacaatcctctccccagcctcctgcctctgacagggtctgatctgaccgagagcaggcagtctcgagcttgtgtgcttactgctcatgacttggaggaggaacttttccattcttggggttttgctggtattttctaatttgtctgtccaggaaggtgtggtttgtagcgagtgctttgtgtgtgggatctgttctcagtgcagcagggcttagtgttggaagtcactgtcctgctctgttggctcattcctagggtagtgacaggtggctgtgccagcatcgctgcatgtgacagtgtagctgtgattggtaatttgcttgtttctctcaaactatttagtgtgaagagttttttgttgttgtttttgtttttaacttgcaagccagttgttgtcttccgaacatcatgtggaaaggaagctctccccaccctagtaccctgagacacacagtgctgcctgagaaatgcagtcatacacctgcacccagtttctcagttgctccccagttcttccatgctctctttgtgtcaaatgagtattctcataatggctggggctgctggggagggaagcggcaggcccaccgtaggacacagcatcctccacaggttttagaataatcatcctataatctagagaaataggtgctatcaacaggaaattaagcaaaatgctggatgctgtgaatcttttgtcttaatttttttctattcttaaactacaggctgtagatgtcttagttctcacagaacttctgtctttttaaactgacttgtgtgtttaagtaaacaaaactcttgtaggatgttttgtgccattgccagtccgtctcctgtgatgcttttgattgtcttgagattttctgtttttaaaaatgtagcatttgacttttttgccaaggaaaaataaatactatcccagtgcaga

SEQ ID NO: 840 - protein, 470 aa, Mus musculus
PVPPLAFSASCGCGATAALPTMARKAVSRKRKASDGAGSDAQGPQFGWDHSLHKRKRLPPVKRSLVYYLKNREVRLQNETSYSRLLHGYAAQQLPSLLKEREFHLGTLNKVFASQWLNHRQVVCGTKCNTLFVVDVQTGQITKIPILKDREPGGVTQQGCGIHAIELNPSRTLLATGGDNPNSLAIYRLPTLDPVCVGDDGHKDWIFSIAWINDTMAVSGSRDGSMGLWEVTDDVLTKSDARHNVSPVPVYAHITHKALKDIPKEDTNPDNCKVRAFNNKNKELGAVSLDGYFHLWKAENTLSKLLSTKLPYCRENVCLAYGSEWSVYAVGSQAHVSFLDPRQPSYNVKSVCSRERGSGIRSVSFYEHIITVGTGQGSLLFYDIRAQRFLEERLSACYGSKPRLAGENLKLTTGRGWLNHDETWRNYFSDIDFFPNAVYTHCYDSSGTKLFVAGGPLPSGLHGNYAGLWS

SEQ ID NO: 841 - DNA, 60729 bp, Homo sapiens
  misc_feature (1)...(60729): n = A,T,C or G
nnnnnnnnnnnnnnnnnnnnnnnnnnnnnnnnnnnnnnnnnnnnnnnnnnnnnnnnnnnnnnnnnnnnnnnnnnnnnnnnnnnnnnnnnnnnnnnnnnnnnnnnnnnnnnnnnnnnnnnnnnnnnnnnnnnnnnnnnnnnnnnnnnnnnnnnnnnnnnnnnnnnnnnnnnnnnnnnnnnnnnnnnnnnnnnnnnnnnnnnnnnnnnnnnnnnnnnnnnnnnnnnnnnnnnnnnnnnnnnnnnnnnnnnnnnnnnnnnnnnnnnnnnnnnnnnnnnnnnnnnnnnnnnnnnnnnnnnnnnnnnnnnnnnnnnnnnnnnnnnnnnnnnnnnnnnnnnnnnnnnnnnnnnnnnnnnnnnnnnnnnnnnnnnnnnnnnnnnnnnnnnnnnnnnnnnnnnnnnnnnnnnnnnnnnnnnnnnnnnnnnnnnnnnnnnnnnnnnnnnnnnnnnnnnnnnnnnnnnnnnnnnnnnnnnnnnnnnnnnnnnnnnnnnnnnnnnnnnnnnnnnnnnnnnnnnnnnnnnnnnnnnnnnnnnnnnnnnnnnnnnnnnnnnnnnnnnnnnnnnnnnnnnnnnnnnnnnnnnnnnnnnnnnnnnnnnnnnnnnnnnnnnnnnnnnnnnnnnnnnnnnnnnnnnnnnnnnnnnnnnnnnnnnnnnnnnnnnnnnnnnnnnnnnnnnnnnnnnnnnnnnnnnnnnnnnnnnnnnnnnnnnnnnnnnnnnnnnnnnnnnnnnnnnnnnnnnnnnnnnnnnnnnnnnnnnnnnnnnnnnnnnnnnnnnnnnnnnnnnnnnnnnnnnnnnnnnnnnnnnnnnnnnnnnnnnnnnnnnnnnnnnnnnnnnnnnnnnnnnnnnnnnnnnnnnnnnnnnnnnnnnnnnnnnnnnnnnnnnnnnnnnnnnnnnnnnnnnnnnnnnnnnnnnnnnnnnnnnnnnnnnnnnnnnnnnnnnnnnnnnnnnnnnnnnnnnnnnnnnnnnnnnnnnnnnnnnnnnnnnnnnnnnnnnnnnnnnnnnnnnnnnnnnnnnnnnnnnnnnnnnnnnnnnnnnnnnnnnnnnnnnnnnnnnnnnnnnnnnnnnnnnnnnnnnnnnnnnnnnnnnnnnnnnnnnnaaataaataaataaataaattacttgatcttattaagtagaaaagttttgtctcttcctttattttcttattttattaaggttacagataaaagtaagactgtttaacaggcaggagcaacagaaaacaaggactcttgaaactttacaaactctatgatcaattaatgaatgattggaaattgtctgtactgagaatgatggctcgcacctgtagtcccaagtactctggaggctgaggcagaaggatcccttgagttgtgagtccagcctggacaacatagtgagaccctgtctctaaaaaaataaatgaaacagaaattgtctgtactgtacttaacacaaattctaccaacgtatgccaaattatgcataacatatagaaatagaatttctgctgtcaaagtagtagatgttctggataaaacatttcaggttctgaataaagaaaaaacatgagagtacaagggaaatgctaaaataaataccacttgagacttcaactggacccagatatttaatgtggtagtgctgaaaattatgggcctagcatggtgactcacgcctgtaatcccagcacttagggaggccgaagcatgtaaagcactttagctcaggagttcaagaccagcctgtgtaacatggtgaaaccccatctctacaaaaaatacaaaaattaggcgggcatggtggcctgcacctgtagtcccagctacttaggaagctgaggtgggaggatggcttgagcccaagaggcaaaggttgcagtgagctgagatcataccactacactccagcttgggccacagaccctgctctcaaaaaaaaaaaaaaaaaagatcccccgtcccaggcccgccggacccgcgctagcagcgtggcagcagcgtggcagcagcgcggcagcggcggcggcggcggcgggcggtccagcgggtgtttctctcgggtcgcagggtctcccagcagcgtggtggactacctgatcagcggtggtaccggctacatgcccgaggacgggctcatcgcgcagcagctcttcgccagcgcctaaggcctcacctaggacgccttcctgattctcccaggactcatagacttcatagctgaggtggaccttacctcagccctgacccggaagatcacgctgaagacaccgctgatctcctcccccatggacactgtgacagaggctgacgtggccatcgcgatggctctgatgggagatactggtttcattcaccacaactgcaccccagagctccaggccaaggagctacggaaggtcaagaagtttgaacagggcttcatcacggaccccacggtgctgagcccctcccacactgtaggtgatgtgctggaggccaagatgcggcatggcttctctggcatccccatcactgagacgggcaccatgggcagcaagctggtgggcatcgtcacctcccgagacatcaactttcttgctgagaaggaccacaccaccctcctcagtgaggtgatgacgccaaggctcgagctggtggtagctccagcatgtgtgacgttgaaagaggcaaatgagatcctgcagcgtagcaagaaagggaagctgcctatcatcaatgatcgcaatgagctggtggccattatcaccggcagcgacctgaagaagaaccaagactaccctctggcctccaaggattcccaacaagcagctgctgtgcggggcagctgtgggcacccgtgaggatgacaaatatcgcctggacctgctcacccaggtgggcgtcgacatcatagtcttggactcgtcccaagggaacttggtgtatcagatcgccatggtgcattacatcaaacagaagtacccccacctccaggtgattggcaggaacgtggtgacagcagcccaggccaagaacctgattgacgctggtgtggacgggctgtgtgtgggcatgggctgcggctccatctgcgtcacccgggaagtgatggcttgtggtcagccccagggcactgctgtgtacaaggaggccaagtatgcccggcgctttggtgtgcccatcatagccaatggcagcatccagaccatggggcacatagtcaaggccctggcccttggagtctccacagtgatgatgggctccctgctggccatcaccatggaggcccctggtgagtacttctcagacgaggtgcggctcaagaagtactggggcatgggctcactggatgccatggagaagagcagcagcagccagaaacgatacttcagcaagggggataaggtgaagatcgtgcagggtgtcttgggctccatccaggacaaagggtccattcagaagttcgtgccctacctcatagtgggcatccagcacggctgctaggatatcggggcccacagcctgtctgtccctcggtccatgatgtactcaggagagctcaagtttgagaagcggatcatgtcggcccagatcgagggtggcgtccatggtctgcacttttatgaaaagcggctgtactgaggacagcagtagaggccaaggtgatggagggggcacagcctccccccataactggagtggtccacagatttgcatttacgggttccccagctcctttccagggagagaggagggcaggccctgaagggtctccgggccctcgctgggcatcccctgcagagtcagggctgctccctgggccaggctgccctgggagccccccgagcccagccagccaggttctcaggccctgcacctgcctcaggtctttcttgctgcagcctgctccagcccagcccccatcccaggggcaggcagcccctcctggtttctcctgtagggcacctccctgcccccagcccccccaggaaatggtgctctcctggccctgcctctggcccttcgtgggccgctgccccctcagccatgtagcacttctgagctcctgacctaggccaaggggaggtctctgccctcttccccggccctgggctacccttgggtcctgctcctcaggccactcccctgtccctggccctggggaggaggctgccctggtcatggccacctgcctgtcattcctgactcatcaccgtccccagtgaaccattcctgccctctcctcagctgcagttgaaggctttaactttgcacactttgggatcacagttgcatcattatgtgttaagtaattggaataaatcaagcaggtctcaatgccaaagaaagaaagagaaagaaggaaagaaagagagaaagaaagaaaagtagaaaagaaaagaaaagaaaaaattttgtagaccagagttcatgggtttcagctctggcttatctcttgtctggttgcatgacttgtcatttttggccttagttttctttaaaactataagtttaagacatgagctgtctctctatatctaccacttttttttttttttttttttgagacggagtctcactctgttgcacagactggagtgcattggctgaatctcaactcactgcaacctccgcctcccgaattcaagtgattctcctgcctcagcctcctgagtagctgggattacaggtgtccgccaccatgcctagctaatttttgtatttttagtagaggcctcaagtgatccacccgccttagtctcccaaagtgctgggattacaggtgtaagccacctcgcccggcctatatcttccacttttaataacctatgcccagaatctgaaaaatatttccacagtgggtgaagtaattacgattccatgcctcagaggcctctcacatccctacgtcatcggagagccgtttttgtgcgcttaccatctgtgttcatttgtgtcctatgtcctctgggtctctttccttgctatgttttattatggttgtatgaattaaaatccaaaatcctttttcctaacagaaatactttcctcctgagctcttacttgcccctttgctagcaagcgtggttaattagctccaacacatgaagggtagagtcaaacagggaattgtattaacatccgctttgtttgttccaggaaacctatgcaaataaacaagagaaaattctgttactaagcaagtataacacaattcagtttgcccaaagcactttatagtatttcttattgtttattcttcctggcaagaccaaggcaagagaaggtaacaggtgcagatccattaatgaccctctagcagcacattgcattgtgatgaaatggttataagaactgaattggaggaatggggttagagaagattggaactgttggggtttttatttgaggctacaaaatagtatagtttgagggccagacactgtggctcatgcctgtaatatcagaactttaggaggccgaggcatgcagatcacttgaggtcaggagttctagacaagcctggcaaacatggggaaaccctgcctctactgaaaatacaaaaattagggccaggagtggtggctcacgcctgtaatcctagcactttgggaggccgaggcaggcggatcacctgaggtcgggagttcgagaccatcctgaccaacatggagaaaccccatctctactaaaaatacaaaaacattagccaggcgaggtggtgggcacctgtaatcccagctactcaggaggctcaggcaggagaatcgcttgaactcaggaggcagaggttgcagtgagctgagattgcaccattgcacccagcctgggcaatgaagcgagactgtctcacaaaaaaaaaaaaaaaaaaaaaagaaaagaaaagaaaaatgaaagaaatttccaggctaggcatggtggctgatgcctgtaaccccagcactttgggaagccgaggtgggtggatgacctgaggtcaggagtttgagaccagcctggccaacacggtgaaaccctatctctaccaaaaatacaaaaattagccaggtgtggtggcgcaggcctgtagtcccagctacttgggaggctgaggcaggagaattgcttgaacccggaaggcagaggttgcagtgagctgagatcgtgccactgcaccccagcctgggtgggagaatgagactctgtctcaaaaagaaaaaaaagaaatttccagaacctcagaaggctccctgaggtcccctgccagttagtaatcccgcttaagggtaatgactgatttctcttaccatggatcagttgtgcctgttttcatacttcaaaaacatgaaattaggcatttactaattacatttaggaattactgctttggttggcctcagtgtctcatacctgtaataccagcactttgggaggccaaggtgggaggatcgcttaagcccaggagtttaagaccagcctgggcaaccaggcgagaccctgtctctacaaaagataaaaaataagctgggtgtggtggcacatgcatgccatgccactgcactccagcctgggcaacaaagcgagaacttgtccctcaaaaaataaaaataaaaaaaggaattactgctttgtgtttgacttttttggagacaggtctggatctcccaggctggagtgcagtggcatgatattggctctccacctgcaacctccaccttctgggctcaagctatcctcccacctcagcctgccaactcccaagtagctgggactacaggtacatgccaccccacccagctaatttttgtatgtttctatagagacaggattttcccatgttgcccatgctggtctcaaactcctgagttcaagcaatctacctgcctcagcctcccaaagtgctaggattacaggggtgagccccgtgcccagcagtgtgtttgatttttttttcttttcttttctttttttgaaacggaaactcattctgttgcccaggctggagtgcagtggctcgatctcggcttactgaagccttgatctcctgggttcaagcgattctcctgcctcagcctcctgagtagctgggactactggcgggtgccaccatgcctggctaattttgtatttttagtagagagggggtttcaccatgttggccaggctggtctcaaactcctgacctcaggtgatccacccgccttagcctcccaaagtgctgggattacaggcgtaagccaccacccctggcctgatatcttttatgcaatattataaaattcattcacacagttttgtcaaggtgaaataaaatatatagatgaatctctaaaattaaaatgttttgtgaagcaggaattgtaattcagggcacacgcagactgggtggtctttgccatgtctgcagaacaaagagaaggttggaagttttgtaaaaaggaagtgttatgtattgctcttcaagaaagttcactggcactagtaaggttttggagagctggcaagttttgattggtaagtgaaggcaataagtaaaactatttctgagagtcacagtaggttgttttaacagctattagataaaactgctttcagattatagcacgcagtttcagcagtgaggctcactaagaatgccattcttggagtagttacatgccctgagtactttttcccccagccactctactactttattattgttatcattattattttattattttattttttacacagggtcttgctctgtcaccctggctggagtccagtggcatgatctcagctcactgcaacccagctactcaggaggctggtctcgaactcctgacctcaggtgattggcccaactcggcctcccagtgtgctgggattacaggcgtgagccaccgcacctggcctgcagtcttttaaaggcaattgtcaattaaatttccaaaatggactttcattctgttatttgaatagaaatggtgagctcttggccagccgtggtggctcatgcctgtaatcctagcactttgggaggccgaagtgggcggatcacctgaggtcaggattttgagaccagcctggccaacatggcgaaaccccatctctactgaaaatacaaaaattagtgggcaaccatcctggctaacatggtgaaaccccgtctctactaaaaatacaaaaattagtgggcaaccatcctggctaacatggtgaaaccccgtctctactaaaaatacaaaaaattagccaggcgtggtggcgggcgcctgtagtctcagctattcgggaagctgagccaggagaatggcgtgaacccaggaggcggagcctgcagtgagccgagatcgcaccactgcactccatcctgggcgacagagcgagactccgtctcaaaaaagaaaaaaaaaattagctgggcaacgtggcgagcacctgtaatctgagctactcaggaggctgaggtaggagaatcacttgaacccaagaggcagaggttgcagtgagccgagatcgtgccactgcactccagcctaggctacagagtgagactccatctcaaaaaaaaaaaaagaaaagaaatcgcgagctctgctataaggtacatttggggatggttcctaggttgtgaagatgaagtaaaggaactttgagaaagagactgcagcagtgcccagtgtgcccctcttggcactgacagcccaatctgagcctagagattctcaaaggattccagactcttgcccaggggctcttgggtcatccagagcattgcggggcaagacagaattagaacagactcaaaaaagaaagctgacccactcctgacccactcactatgtgcatatctctaaagggacaggcctgaccaaataagatggagctgcctttcgcaagacattaggggttagtggtagtgccgacttgggatggcaggagaccctgcttcaatctggtctttgattcggcttggaaaacaaatccaaatctccttgttgacagaacttgagatggtccaacagagctccttggaggtatgaggcctgaggcctgaagcctgaagtgaccagcaggtaactgggcaccacagcctgaggccaatcagccccaagcaagagcatcctgcttcctcagagggtttgtttgcttgaggaaagcgaaggctggcagtcatattccttcaggatcttccaaaaatgttggcaagggtgatcctgatgaagcccccttgtttggaggccaatgccagctctaactggactggcaagccaaaaatgaccactctctttcctgtagttcagaattcccgacctgccctaatggagacgcaacctgaatccaagagtgaggcaggcagctacagataagtttacagcgtgatgactacttcataaagcacaaaagaccatgtggtttagatggcaggtcatggaaatctaaagggaatggtgaagttgcaccgtaaggggaaggtgactgaggagctgaaactgactgaggggctgaagcatttcggacaggagaaaggatcaggaggagacagagcggagaatggagcctcagggctacccagcggtgggaagagggtagccagagactcgtagggcggcctgggttggttgtgctgggcaggttctcagtggtgggaaagtctggccacactgccctgacttcctgactggacttcacctcgagggtgggagcggttcctgccccccacccccccacccccctgtccagcccttggagccagggcacggtttgtgacagattcagggaaacgtttggtgccagatgggaggtaaccgggttaaggcctgcactagggaggattccttcccccagcagcactggtggtcctcacttccgggtgcctgcggataggcgggctggggtcggaggtcggcggccagaagccagattcccttggccccagctcgtccacttccatccagcagtagccaaacaaccgttgaaaatggcctggcggcggccgggaaacaccagagaactatcttccaacccctagatcccgcccctctcgttccggcggtgtttccgtggcgacgctatccgaagtgcggctgcgcaagggtgacggcgcgcgagcaagggggagggggtgttttggttctagccgctcgccgtccttgcaggctctgccgtcggaaagccgctcattctcgcttccccttccctttcccggctcaagtccttcctctctctttcctttctttccgcctatcttttttctgctgccgctccgggtccgggccattttccgggccgggcgcactaaggtgcgcggccccggggcccagtatatgacccgccgtcctgctatccttcgcttcccccgccccatgtggctgcggggccgcggcggcgctgcccactatggcccggaaagtagttagcaggaagcggaaagcgcccgcctcgccgggagctgggagcgacgctcagggcccgcaggtgagggttgagaggccggcacctgggtggtgaggctgaggaaccaagatgggcttagggtccgcagatcctgcgacgggaatcggggtccagggtctgcagtcagaggcaaaacaggaatgggttcagggcctatagggtcaggactggaccctcgttaactggagggcagataggccagggcggtgaggagccaaaggggaactcaggaatgggacataatccgcgggaggcctgcattcgtggatagggcttgaaaagaaaccagaatcttggctttggaggaaggggaaaccgaagttaagggaatcggaaacaaactctggtagagtgaactctaccttccatgggccctaggaagctgggatgattgcgtccctcctggaagaaggaagtagtctccctatatgtatacccaaccctgagctgggcctttcggcgtttggaccccaaaagaaacaacagttcccaggtatcatctctatgccgccccctttggaggggaaggccttcttggacatagatatggcctctgatttcccgggggcctactaccccgttggcggttgatttttcgaattctgcaactgcctggagcgcgggcatgatgacagaggaacggtcattgatgatgcatccctggaagacctgggagccaggtctggctccttggactgtatcttccgtgctccagtgggagtacagactgagagggagaagggggctgggtagagatgcagcccatgtcggtatgggaatcactctacctctcatttccttcaatctttcactcctaaaatgtctagtaaaccttttagtctgttctattctgcattcattcccttgactttcagcccttgtaattcacattggtaagtttgactgtgagcaacatctttttaatgttggaagagttaaacgactttctggattgagattcttgttctcttgtgtttgtatttgtgttgtttgtaaattctgcagtatgagttatgagttggtgatttctgtaatacagtaggatctgttctgaagaagagtagccaaagccctgatttctaatgttgtttccacagtttggctgggatcactcgcttcacaaaaggaaaagacttcctcctgtgaagagatccttagtatactacttgaagaaccgggaagtcaggctacagaatgaaaccagctactctcgagtgttgcatggttatgcagcacagcaacttcccagtctcctgaaggagagagagtttcaccttgggacccttaataaagtgtttgcatctcagtggttgaatcataggcaagtggtgtgtggcacaaaatgcaacacggtaagtgcctggggggatgtgacctctctcctaggtcgtggatatattgctccacttgctctagaacctctgctagttttcccgtctgtttcttttaggagggacttgccttactctcctttccattctttcccgttggtgacttcttcctcttttcgtgttccttttttcactcatacatttcttttctgataagtcctcaaaggagtgtatttcttcaggccctctctggatgtgctgcttctagagggttgtttgtttgtttgtttgtttttgcctcatatttttatgctggtttttaagtcataggcctcaaaggaaagatttaagaaataatgatgcttagagcatcattcaggatacataatagtgaaaacagcctaagaacgtatgtcgaagtatttaaaatagcacacttggctgttttttagtgaacagaatctaaaaatgtataaactgaaatatgagaaatacatgaactgtttcctataaggaaggcagggaatgtgtgtctggtagtatatttcagggtataagcattagctctttggaaagtagcctttttaagagtgaatagaaagacagttataaatgaatgaagtgaaaaatttctcagtaagctttgtaaccaacccaattataggccaggataaaataagtcaaagagcagaaacgtttggaatagagtccacgaatagcatgatgtcacaagactggcaaatgaaaagaggcagggcctagggcctaggggtgggaaatgattacgcccagccctccctcggttttcacctcccctgtgtgaatggacaagtaatgtcataatgtgtgagtaaattgaccctggaatgaaacacattttggatcattaaaagagagaagattgctctagatcaagaaagtcttaagtactaggagaagtgtctgtttataaaggacataggcaaaaatttaaacagttttaaggaaggaaataataccatggtggttggtctgtttataaaggacataggcaaaaatttaaacagttttgaggaaggaaataataccatggtggttggggccaacctttcgtttcctcttctgttgaggagtcgcttgtcttacccagaagcctttcaaaactaagtggtggcaacgggcctccacagaacttccttttcttggtctctccagctgcccactcgtggttaagaactgtcatccttgtcacttggagtagaaaaagagtctcctgcttggaagagttcattccactccccgcacgtgcatcatagtgtttagcctagcaaatattactgaattgtaaactgaattaatcatcatagcctcttgcttgttgaatttattgacactattttgaaggcgagcataataagtaataatttaacctactcttaattcctacctctttctgtcttcctaatcctcataacctagtgtttggggcaaggggagctgttttcattttatagttagtatttgtttgtttttgcttagcttccagaaccaaagcagggaactaggaatagtgctcttctctgaactttgtgacattgggcaaatgattcccttatttgtgcttttgtttttgcatctgcaaaatgggagtgataatatctggtgctaaggtgtctgcatgcatctgggaaatattctgagtgagcaatatcttacttatttaaaagtactagtagcggtaaaaatgatttccataaccttttcccacaatttgaagagaggaaaattatttaaaaattggaattgtctttggataatgtgtgaagatttcagaggtgggagagattatgttgtattctcaataggaaagttttgatgtagaatgtccctgtgctgtgggctaacaatcaaactagggtagtcattcaatccccagatttcttggccccagctagcacagcagtaacagcaaggatagccactgttgtttttatcattaataacaataaagtcatatttttactcaactgcttaagtagaggtggtataaccttaattagaacatggatctggcagctgggatgggttaggtatatgttcatggtttagacttacgcaaattcagattggctgcggagccagacagaaaagctaagtgaagaaaagtttgctaggcgcaagacagtaaggagtagtaggggctgcaaagaactacagaaggcattcttgactttaaccaactgttgccgtgtaggaatttgagcctagtgttaaaaagattttctttcgcagggcaaggtggctcacacctgtaatcccagcactttggaaggccaaggcgggcggatcacctgaggtcaggagttcgagaccagcctggccaacatggtgaaaccctgtttctacagaagtacaaacaaattagctgggcatgatggtgggtgcctgtaatcccagctactcggaaggctgaggcaggagaattgcttgaacccgggaggcggaggttgtagtgagctgagattgtgccattctactccagcctgggcaacagagtgagactccgtctcaaaaaaaaaaaaaaaaaaaaattgatactaatgtcttgaacctatataactggaaagatggcagggtgaatgttaaggaacagatttgggttttgtccttttcatcaattagttgaagcttggcagagagtaaggattgaagttaatgatttggcagtcatttatgtagaaggaattattgaaattgttacattatcatgggaaagacagtagagagcaggcattcctggcttgagttgtgtaaactttccctaaaattgcaaagttttgattatatgtgtactttctgggcaagattttgggggggtggtgtgggaagtcgttcttagtttttgtccttagattttgaaagagagtactatgagccaaaaatggttaagaaccactgatactgacagataagctaaggagagaaccttggaaaacatgtacatttacagggcaagaagaactgctgcgggggagcagggaactcaggaaaaccgggagaatacagaaaagaattcaagaaaggaggactttatttttgtttgtttgcttttttggtttttttgagacagagtctcgctatgtcaccaggctggagtgcagtggcgcgatctcagctcactgcaacctctgcctcctgggttcaatcgattctcccgcctcagcctcctgagtagctgggattacaggtacctgccaccacacccagctaatttttgtatttttagtagagatagggtttcaccgtgttggccaggatggtctcgatcttctgacctcgtgatccgcctgccttggcctcccaaagtgctgggattacaggcatgagccaccgcgcctggccgaaaagagggctcttgaaggggctgggggtggggtgtgatttgaggagaaggatggcaatcggcagagtgatgatctacacagttggaggtatttaattttggacgtgaactcttatttcccattgtcagcactctccagtcaaagactaccagggactgttcttgtagcagaacaagtcagatatagttgcttgttgtacctaggagaaccttcaccataagagagcgagggacctctcggtaagagtgctggaaaggagttacaacactgggacttgttgcacgtgatttgggggacggcttaaggatatagcactttgctccagatggatactgtcacgacgggcaaattctatgtttgggtatcttaatcttatctagcaggaggttaaagctgtaattgataaagatgaaacagtcatttatattagccaggttaaggggatgtttgatctttttgtggtttagtcagtgttcttgggtttttttgtttgtttgtttgttttttgagatggagtctcgctctgttgctcaggctggagtacagtggcatgatcttggctcactgcaacctccgtctcccaggttcaagtgattctctcacctctgcctcccgagtggctgggagtacgggcacatgccaccacgcacagctaattttcgtatttttagtagagacagggtttcaccatgttggccaggctggtctcgaactcctgacctcaggtgatccacctgcctcagcctcccaaagtgctgagattacaggtgtgagccaccttgcctggccagtgttcctgttttggtctgtgttcaggtatgattatagagtggtcttgtttttgtctttatcacagttgcagagtggccttgtctgatgttgatattctctgaaattatttatttacgctaggacaccaaggcctacctgagagtatcaggctaacccattatgtcagggttgctttgttttcttttttttttttttttttgagaccgcgtcttgctgtgttgccaaggctggagtgcagtggcacgatcttggctcactgtaacctttgcctccgggttcaagcgattcttgtgcctcagccccccgactagctgggactacaggcgcgtgctaccatgcctggccaatttttgtatttttagtagagacggggtttcaccatgctggccaggctggtctcaaacgcctgacctcatgtaatctgcccgcctcagcctcccaaagtgctgggattacaaacgtgagccaccatgcccagccactttgttgtttttcaagacagcattttgcactcagggtggagtacagtggtgcagtcatggctcactgcagcttcaaattcctgggcccaagggatcctcctgccccagaatcctgagtagctgggactatatcacatgccatcatacctggcctttttttttttttttttttttttttttttgagacggactttcattcttgttgcccaggctgaagtgcagtggctcagtttcagctcactgcaacctccgcctcccaggttgaagtgattctcctgcctcagcctcttgagtagctgggattataggcgcccaccaccaagcccggctaatttttttgttttttagtagagacagggttcaccatgttggccagtattggctgggtatagtggctcatgactgtaatccagcactttgggaagctgagacaggaagatcacttgagcccagagattcaagaccagaccagcctgggcaatgtagtgagaccccatctctacaaaatatttaagaattagctgggcatggtggcttgtgcctttggtcctagctactcaggaggctgaagtgggaggatggcttgagtctgggaagtggaggctgcagttaaatgggattacaccactgcactctagcctgggtgacagagcacgaccctgtctcaaaaaaaaaaaaaaaaaccgcaaaagtacatagtatttgttgaaagaagagcctaaaaatgttatacccttttgcctaaaatgttcacacctgagaatttatccaaaggaaaagtcgtttttaacaagataataattggaagctacttaatctaaatactaacaatcgaatacttaagtaaatagtgataaatctggatggtattatgcagacattaacataattatggagactgtaatgtgcgaagaattcagtacgtttaatgaaatgagatacaaaatcctgtctctgctgataatagctgtgcacaattaaaatatatatgtggttgaagactaaacaggaacctgacaaatgaaaaacagattttaaaagagagaaaattctgagtgatctttcttgcattttaaatttctgtattgttgataaagtatcgtttgtacaataaacactcatcttttaaaactgttatttcagctagatgaaccttgcgttttcttatcctaaaatgacggtgagaaggaccgaagtaggggctcaaaaatacagtagtagaatatgcaacaaaaggagttgctcctcttagtcacacagtgagttttttggagctcaaaatagcccctggtgagggctcttgattctcaatgggcaaatacacaaccatatggtcctggtcctcaagtcttaatgctgttatacttaggaagtaagtgtgagataagagagatattattattattattattttcttttttgagacagggtcttactctgttgcccaggctgcagtgcactggcgcaatcttggctcactgcaatctccgcctcccaggttcaagcgattcttctgcttcagcaccaccaagtagctgggattacaggtgtgtgccaccacgcccggctaatttttgtatttttagtagagatggggtcttgccatattggccagcctggttttgaactcctgacctcaggtgatctgcccacctctgcctcccaaagagctgggattatatgcatgacccaccacgcccggccatattatcattatttaacactattgttaagagtttataatctcttataccagatacgtaattaccgtctctgctctccagtagtttgcaagttagggataaagctccctgttaattctgagtagaaggccttatacctggaaatgtcaccagggaacaaaaacctgaaagtttcctgtgtacagattttctcctgaataacttacacgttaactgttagcatccttgagtatatagaaatcaatttcaggccgggggcagtggctcactccggtaatcccggcactttgggaggctgaggcaggtggatcacttgaggccaggagttcgagaccagcccggccaacatgatgaaatcccgtctctactaaaaacacaaaaattagccgggcatgatgccgcatgcctgtggtcccggctactcgggagtctgagtcaggacagtcgcttgaacccgggaggcagaggttgtagtgaactgagattgtgccactgcactccagcctgggcgacagagtgagtctgtctttttttccatcttggaaaaaaaacaaaagaaataaatcaatttccatcttctataggtaggaagaaataaagattcttatgaaatcagactattggactaatccttttatttcccctttcatttttcagattggtatcacttggaaataggtgatgggatttgtaaacatataaaagcaatactaaatagggttctgatttaacagtccaagaataatttctttttttgtttgtttttttgagacagagtttcgctcttgttgcccaggctggagtgtgatggcgcgatctcggctcactgcaacctccgcctcctgggttcaagcagttctcctgcctcagcctcccgagtagctggaattacaggcatgcgccaccacacccagctaattttgtatttttagtggagatggggtttctccatgttggtgaggctggtctcgaaatcccaacctcaggtgatcctcccgcctgggcctcccaaagtgctgggattacaggtgtgagccactgcacccagcaagaatttctttttaacaaatatttgtttagatagatgcttaaggtagctaaacctctgttgtatgttgtcaaagtttatgtggtgactttggtgggtactaggtaaaatcaaggtgtcttgccaaagctggcttttaggattcagtccatttttaacagagacctccaaaatcaaggattagaggccgggcgcggtggctcacacctgtaatgccagcactttggccggccgaggcaggcagatcacgaggtgaggagatcaagaccatcctggctaacacggtgaaaccctgtctctactaaaaatacaaaaaattagccgggcgtggtggtgggcaccttttttttttgagctccatctcaaaaaaaaaaaaaatcaaggattagaaatcaatttactgctagatataaagcttataagaatatgtcacttaaatccaaaataattgtaaatcctaatgtggccctccttccacgaagtcatgattctgtggcgaaacatcagaattcaagacctattatgaagtaccattacttatcttagctagctagtagtgtagtccatcttgtgtaggaacagtttagattcacagctcagagtgtctaagatcttggcatagcgcagacacgtggactgattgatgattgatttttgagacggagtctcgcgctattgcccaggctggagtgtaggggcacgatctcggcttactgcaacctccgcctcttgggttcaagcgattcttctgcctcatcctcccgagtagctgggattacacacccgtcactgtgcccggctaatttatgtatttttagtagagatggcgtttcgccatgttggccaggatggtctcaaacttctgacctagagtgatctgcccccctcagcctcccaagtgctaggattacaggcgtgagccaccgtgcccggccggatttatttattaatttattattattatttgaggcagaaccttgccctgttgcccaggctgagtggtgccatcttggctcactacaacctccgccacctgagttcaggcgattctcctgcttcagcctcccaagtagctgggactacaggtacgcactactatgcccggctaatttttgtatttttaatggagacagggtttcattcactttgttggccaggctgatcttgaactcctgacctcaagtgatctgcctgccttgaccgcccaaagtgctgggattacaggtgtgagccactgtgcccagccagatttatttatttatttgtattatttatttatttatttttgagacggactctctctgtcgcccaggctggagttcagtggcgcgatctctgcagcctgcccctcctgggttcaagcgattctcctacctcagcctcccgagtaactgggattaaaggcgactgccaccatgcccggctaatttttatatttttagtagagacagggtttgccatgtttgccaggctggtcttgaactcctgacctcagttgatctgcccacctcccaaagtgctaggattacaggcgtgagccaccgcacccagccctggatttatttatttaattttgttcctccttattccccagtactaagaggaggccctggatttcaataaaagaatgttcattgccatgttttgtattactaaaaatttggacgtggcataaatgttcaataatagggaattaattcaattaatgtcagtatattcatgcagtgaactaccttatcgccgttaaaggtatgtagtggcaaggcttgatggcttatgtctgtaatcccgcactttgggagactaaggcgggaggattgcctgagcccaggtgggttttattacaacatgggcaacaaagtggcaccctgtctctataattaaaaaagatgtacagtagttcaaactgttcacccatcactagttcctcagtgtaagttcctaaaattggtattacaagctatatatatatgtctatggggagactgcagagactatagggtcctgctatgtgtatatatatacttttttttttttgagacgaagtcttgctctgtcgccaggctggagtgcggtggcgctatctcggctcactgcaacctccgcctaccgggttcaagtaattctcctgcctcagcctcccaagtagctgggactacaggtgcaggccaccatgcccagccgcccggctaattttttgtatttttagtagagacggggtttcaccatgttagccaggatggtctcgatctcctgacctcgtgatccgcccgcctcggcctcccaaagtgctgggattacaggtgtgagccaccgcgcctagccgctatacatatttttaatgtttgatacatattgtctgtccattttctgttgtgtttcttggtcttggctctctcctttgctcctccccactttctcagattgggatagtgaatagattcttctgctttgatttcacttgtctttcctttcccaacctctccacagacttaggttgcccacctgtcttttactgactgcaacatagtgtgtcttgttgtctgtgtgacctgcgtagaattactttcctttctcattgggctccagtctgaaacacccttgaattttagaaacattgtaaggttaccccttcctcttttttttgtttttgtgttttttgtttttagaggcaaggtcttgctctgtcacccaggctggagggtaatggcacaattatagctcactgaagccttgacctcctgggcccatgagatcctcatgcttcagcctcccaaatagctgggacgataggttcctgctaccacatctgactccttttttttaagccatctttgtctttgtgtacactcatttacatttgtctagatacacatgaatgcatgcagagatagactcactagtcttacatgtctctttccccccatcctagaatgtaaactgcagggagcccgagcctcgagcttaccttgccgcgctgctagtttctggcagggatcccagtaggttaatgtggagcagcctcattctgggaaatgttagtggagctgcatgaatccttggacccttgtcagagagcttgggaagagattctgtggcagctcatccacatcctgtttcttcccatgaagaagcagggtggctctatccttcaagtggttcattgtcattcctttgcaataatgagggtgaggttgggggcacactcttagtttagctaatttttggatttttagtagagacaaggtttcaccatattggccaggctggtctcaaactcctgacctcaggtgatccaccagcctcagactcccaaagtactgggattacaggtgtgagccaccgcatccagccaagatcaactttttaaggttccacatataagtgaggtcattcagtattctatacttggcttgtttcacttaacataatgtcctctaggttcatccatgttgtccaaaggatttcattcttttttatagctaaacagtattgcattgtgtatctgtgccacatttttttttttgagacggagtatttgccctgtcgcccaggctggagtgcagtggcatgatctcggctcactgcaagctccgcctcccaggttcacgccattctcctgcctcagcctcctgagtagctgggactacaggtacccaccaccacgcccggctaattttttgtatttttagtagagacggggtttcactgtgttagccaggatggtctcgatctcctaacctcatgatccgcctgccttggcctcccaaagtgctgggattacaggcatgagccactgcgcctggcctgtgccacattttctttatgcatttattcactgatgcacacttcggctgattccgtatcttggctattgtgaataatgctgcagtaaacatgcaaattcagaaatgcctaatggaagagttttagggtaaggcctgggaattgtttttgttttgtagtgttttgtattgttttttaaagaaaattcagccttggtgcggtggctcatgcttgtaatcccagcactttgggaggctgagatgagcggatcacttgaggtcaggagtttgagaccagtctggctaatatggtgaaaccctgtctctactaaaaattcaaaaattagctgggcacagtggtgtgcacctgccatcccagcgacttgggaggctgaggcacgagaatcacttgaacccgggagccaagatcacgccactgcattccagcttgggtgacagagctagactctgtttcagaaaaaaataagaaaaaattcaggccgcgtacagtggcccatgcctgtaatcccagcacttcggaggccaaagcaggnnnnnnnnnnnnnnnnnnnnnnnnnnnnnnnnnnnnnnnnnnnnnnnnnnnnnnnnnnnnnnnnnnnnnnnnnnnnnnnnnnnnnnnnnnnnnnnnnnnnnnnnnnnnnnnnnnnnnnnnnnnnnnnnnnnnnnnnnnnnnnnnnnnnnnnnnnnnnnnnnnnnnnnnnnnnnnnnnnnnnnnnnnnnnnnnnnnnnnnnnnnnnnnnnnnnnnnnnnnnnnnnnnnnnnnnnnnnnnnnnnnnnnnnnnnnnnnnnnnnnnnnnnnnnnnnnnnnnnnnnnnnnnnnnnnnnnnnnnnnnnnnnnnnnnnnnnnnnnnnnnnnnnnnnnnnnnnnnnnnnnnnnnnnnnnnnnnnnnnnnnnnnnnnnnnnnnnnnnnnnnnnnnnnnnnnnnnnnnnnnnnnnnnnnnnnnnnnnnnnnnnnnnnnnnnnnnnnnnnnnnnnnnnnnnnnnnnnnnnnnnnnnnnnnnnnnnnnnnnnnnnnntgtctcacacaacacaaatatgtgagtgggcaattaattttgtttcaggaaataatttgaggattatctggttagggatcatttgtttattattagtttattttttgagacagagtttcgctcttattgcccaggttggagtgcaatggcgtgatctcagcttacctcaacctctgcctcccgggttcaagcgattcacctgcctcagcctcccgagtagctaggattacaggcatgtgccaccacacccggctaattttgtatttttagtagagacaagctttctccatgttggtcaggctggtctcgaactcccaacctcagatgatccgccctcctcggcctcccaaagtactgggattacaggtgtgagccaccacacccagccaatattttttattttttgtttttgagatggattctcactctgtcgcccaggctggagtgcagtggtgtgatctcggctcattgcaacctccacctcctgggtccaagcaattctcctgcctcagcctcccgagtagccaggattacagactcacgccaccacacctggctgatttttgtatttttagtagagatggtttcgtcatgttggccaggctggtcttgaagtcctgaccccaggtgatccgcctgccttggcctcccaaagtactgggattacaggcgtgaaccaccacgctcagcctgggatcatttgtttaaaaggataagaaacccactcacatttattggaaagacgagttcacaaaccccaagaacagaaagtattattggatctcagagagaagtggaaacaggaattgaaaagccactaggaaccaaggatgtccatgtttcctgtcttttttttttttttgagttggagtctcacactgtcacccaggctggagtgcaatggcacgatcttggctcactgcaacctccacctcctgagtttaagcaattctcctgtctcagcctcccgagtagctgggattacaggcgcccgccaccacatccagctaatttttttttttttgtatttttagtagagatggggtttcaccatgtttgccaggctagtcttgaactcctgacttgaagtgatccacccgcctcagcctccctaagtgctgggattacaggcataagccactgcgcctggcccatgcttcaagtctcaagttttcttttctccaaggactggctttggtaaaaagtggccacccgggcggtttggtctagtgccaccagccagttacatattccctaaagaatctgaatggcctagtccaatctagcctttggactgattgtcctgaaactccctctagactgtgctgtgatcagggggtctaggcttatagcaaataaaacagctacagagcctcaccctcacagggatgtgggggcctactacagtagttgggcaggccctctgaaaggtgactgttgtaaatgcttaagtagttgctggggcaagattgtagaatcaaataagataaattctctgcacttagaattgggagagagttaatagctttatgaggaagacaaataagtaaatattttaaatcagtgcgatatggtctaagtgttgtgggtagagggatatcttgggagcctacaagagaggcacttgatcagcctggacatttagagagtagtccaagaggacatatctgaaccgaatcatgaaagataagtacatgttggccaggtaaaagagtaggagaggctgggtgcggtggctcacgcctgtaatgccggcactttgggaggctgaggcaggtggatcacaaggtcaggagttccagaccagcctggccaatatggtgaaaccccatctttagtaaaaatataaaaattagctgggcgtggtggtgcacgcctgtagtcccagctgctcggagggctgaagcaggagaattgcttgaacccaggaggcagaggttgcagtgagctgagatcatgccactgcactccagcctgggcgacagagcaagacttggtctcaaaaaaaaaaaaaaaaaacagaaaagaataggagaatcatttctggcattgtgaacagcatgagcatgaaacaaaataattatatttcattgaagaatttttcatgtatgatatttataagcaattatttctagagtttgaagtccatggcaagaggtgatgatagtagaggctggactgaggagactcttggttttgttttgttttgttttgttttgttgaggcagggtcttgctctgtcacccaggtgcgagtgcagtggcaccatcatggctcactgcagccttgacctcctgggctcaagtagagacagggtctcactgtgctgcctgagctgttcataaattcctgggctgaagtaatacttctttctcggccttccaaagtctggccccgaggagagtcttaatgccatgctaagtatctcagatttaggtgacggggagtcattggatgttttttagttggggactggcatgggaagatttccatttttaggaagttgactctgcttataatagaataattttgatagcggtgttgcctgaaggcacaaagactaattgtggttgtccaaggagaagtgatgagtgaggaagcagaggaaggagtcagctgtaagaatatttaggaggtaggttaggcaggactaggatgatggaaatgagggaaaaggagtaatttaggataaaatccacacttgagtgacagggtagatagtggtggtgttaggaaagtgagcaatttgaggagcaaggttatttgttttgggcatattcagtttcagatgcttgtgggatgcatcagcaatgatgccagttaggcagggagtctgctgctctcaggtagttgccagtttgagagtggtttgtccccttcttccccctgctcccactcagtctctgacactcttctagctactcctttctctctctctgtctttaataaacatatattatatatatttaaatatataaagtacatattatatatacatatataattatatataatttaaatatttatatatgtatccagtgtaatgcccccacccaaggtgttggacatggtggtagagccctacaatgtcaccctctccgtccaccagctcacagaaaacacagacgagaccttttgcattgataaggaagctctctaagacatctgcttccgacccctaaagctgcccacacccacctatggtgtcctgagccacctggtgtctgcactgtgagtggggtcaccacctgcctgagcttccagggccagctcaatggccatgaacagggtcctattcccccgcttgcacttcttcatgtctggactcatccagaccatacaggacaaccagcagtactgagccccgatggtgcccaagcccatccagcggatgtttgatgccaagaatatgatggctgcgtgggacccccctctgtggctgttgcttagcagctgccatgttcaggggccgtacgtgcacggaggaggtggataagtaaatgcttaatctccaaaacaaggacagcagctactttgttcattgaatcccccacaaggtgaaaacagctgtctgtaacatcccaccctgggggctaaagatggctgccaccgtcattggcaacaacacagccatctaggagctgttcaggtgcatctcgtacagttcacagccattttctggcacaaagccttccagcactagtacatgggaagtggcatggatgagatggagttcactgaggctgtgagcagcatgaacatgtccgagtacaggataccacagccaaggaggagagagagtttgaggagtgggcctatgaggaggtggcctagagccttctgtttttgggtaaagggaagaagtgatgtgaactttttattcacccatagtctgttctgtgatagccatgtctgtgtgtgcacttgttcttcatgtcttgacatcacagctctaaagacactccaatgaaaccattttcctagtgaaaaaaaaaaaaaccatatatatatatatataaaaacatatacataaaatacatatatgtatttgtttgagatagggtcttgctgttttgcccaggctggactcaatttgtgatccttatgcctcagcctcctgagtagctaagtagttgggactacaggcacttgccaccttgtccacctcattcatatatatatatatatatttatttattttttttttttgagaccaagtctcacagtctcacactgttgcccaggctggagtgcagtggctcgatcccggctcactgcaacctccgcctcctcggttcaagcgattcttctgcctcagcctcccgagtagctgagattacaggcgtgtgccaccatgcccagctaattttgtaagtttagtagggttttcaccatgttagccaggctgatctcgaactctcaagctctggtgatccgcccgccttggcctcctaaagtgctggcattacaggcgtgagccactgcgctcggccctttttatattttaaacttaagactcacctagtttctcctttcatatatcttctgtgtaagcagcaggtttatttatgtaaaggtttgacatgtttgacttcaacatgagaattgctgacaggattttatttcagcctcttaggctataaggtgtatctattagggcagatattatttctctcgttcatagctgtgttcataacacttagaacagtactggaaaataagtgagtgtccgaaggaatgaactgttgaatcactgaagagtttgactcttctaagggctgtcctttcgctaagactgatttttccataaagcatttctctaagttgaatcttggagggtaaagaggtggaagagagcctttcaggcagaggtagcagcaagagcaaaggcagggaggaataggactgaatgggatgtgtgtgtatagagaacagccatgagatactaataattcttccttgtcgtatgtctctggtcattccagaaaacttagtaatattaatagttatattagtagccatgatgtgttctgggaattgtgtttcgtttaaaagtttctgtgcatggtgtggttaggtgaggattcagtgtataaaatatgaccaaactgacagaaaactgtgttggtcttcctctttgtgtccgtggcctaatagaaggcctcttggaaaccttctctgaatcccaggcagaacttactgcttcctaatctgtgttcatgtagcatattattgctatctctaatattgtgttatattgacttatttcatgtttcatgtcattagtagtcctgaccatgcctttaataattcctagggtctaacatgtagtagttgttaattaaatgttgatgaacagttgaacaaaaggatgtttataccctgtattggccacgttaaatttatgttcagcttctgtatccattttttcttgtagctatttgtcgtagatgtccagacaagccagatcaccaagatccccattctgaaagaccgggagcctggaggtgtgacccagcagggctgtggtatccatgccatcgagctgaatccttctagaacactgctagccactggaggagacaaccccaacagtcttgccatctatcgactacctacgctggatcctgtgtgtgtaggagatgtaagttttcccagtagttgtagttggagggagccttgtttttaaacgggtctcagtgattaacatggaccctcctctcatcagcccagagtggggactggactccccatagggcacagtgtatatttgataaaggggcaagcagcacacctcaggggccaacagtattgggttgctgtttgaatccatagtgtccacatacttcccactgcccatagtcagagagtagcagtttactaaatcatccattcattcatcaggcatttattgagtcttctatggctaggcgttgtttgagacatagcagtgaacagaacagataaagcccctgtcctcttgaagcctacattctagtggagggtgacatatagacaaaacataaaccatataaactaatatttaccagtaatacatcagagtgtgataagtgccatggagaagaataaaggcagcataaagggactgagagtaaggtggaggatgctgtatcagaagataaagtttcattgataggatgacgcttgagcagggagacttaaaggaaatgagggtacaagccatgtagatgtctagatgtctggaggaagagagttccagatggaagatgggacccagaggtagaaggcaagagctatgtgtccactacccacagtagtgccaatttcattccagctttgagctcctcaagatagaaggtaaagattgatcattctctgtgggttgagaccaccagagatcagagttgtaatttctacaaaaatattttcagtctgacttgtatgcttctttagagagtttattacaatccttattttactaatttcttattttcctccctgtacctgttactccctgctctccaaggatggacacaaggactggatcttttccatcgcatggatcagcgacactatggcagtgtctggtaaagttgcccttttatagggagcttttgatgtggcagggattgggggctagagattgaaaagggatagtagtgtgataggaaacagcccagccgggctcagtgactcacgcctataatcccagcactttgggaggctgaggtgggtggatcacttgagcccaagaatttaaattagttgagtgtggtactgcatacttgttgtcccagatactcagaaggttgaggcaggaggattgcttgagcccaggagaaccaggctgcatcaagctgtgatcgtgccactgcactccagcctacatgacagagggtgaccctgtagaataataatttcttatttagtgtaaaagtgatacacatttattgtaagaaaattttaaaatataggccgggtgtggtggctcacacctgtaatcccagcactttgggaggccgaggtgggtggattatgaggtcaggagttcgagaccaggctggccagcatggtgaaaccctgtctctactaaaagtacaaaaaattagctgagtgtggtcgtgggcgcttgtagtcccagctgctcaggagactgaggcaggagaattgcttgaacccggcaggcagaggttgcagtgagctgagatcgcgccactgcactccagcctgagcaagtgtgagactccatctcaaaaaaaaaaaaaggatggatagatagataagatagatagataaaaaaggaagtaaggaccacccacaagatctctatccagagataaccacttttttttgtgggttgtttcgttttctttttgagacagtgtctcattttgtcacccaggcttgagtgcagtggcatgatcctagctcactgcatccttgagctcttgggctcaagtgatccttctgcctcaggctcccaggtagctgggactataggcacacaccttcacacccagctagtaataacgactgttgacattttaaaatataacttgctagtctttttttagtaccttttttcttttcctttagacacagggtcttgctctgtcacccaggctggagtgcagtggcaccatcatggctcactgcagccttgaactcctgggctcaagctatcctcctgcctcagcctcccaaagtgtttagattatacaggcatgagccactgcacccagccttagtatgatttttttttttttttgagacagagtctcactctgtcttccaggctggagtgcagtagcacgacctcggctcaccacaacctccgcttcccaggttcgagcgattcccctgcttcagcctcctgagtagctgggattacaggtgcccaccaccacgccaggctaatttttctatttttggtagagatggggtttcaccatattggccaggctggtctcaaactcctgacctcagtgattcgcctgcctcggcctcccaaaattggcccatattttttagttggttaatatgagatcatttagaagatgcatatatagaattctttgtgaaattctttcttttttttttttggagacggagtcttgctgtgttgcccaggctaaagtgcaatggtgcaatcttggctcactgcaacctccgcctcctgggttcaagcacttctccctgcctcagcctcctgagtagctgggattacaggtgcccaccaccacgcctggctaatttttgtattttttagtagagatggggttttgccatgttggccaggctggtcttgaatgcaggacctcagttgatccacctgcctcggcctcctaaaatgctgggattacaggcatgagccactgcacctggcctcatttttttacactttaaaattttcataataaaactttgatggggtaaatgaggtcacactgtacacaaagtaatcttctgaaacacagttatctaattttctcactctgatgctcaaatctttgagagactttctagtatctgtaagatgagaaacaaattttatagcacagcatacaaggcccacacctatctttccaactttctctctcatagcttccatgcttgcaccccataatccagcattaacaaaccatgtctagttctccagatgtgcccttgtctctgtggccttttctaatttcacataattaacattctactttgaattgatgtgtctgtcattttagatgtttttttctttttttttaatttttgagacagagtctcgctctgtcgcccaggctggagtgcatcttggctcactgcaacctcagcctcccaggttcaaacacttctcttgcctcggcctcccaagtagctgggactacaggtgcgtgccactgtgcctaatttttgtatttttggtagagacagggtttcaccatgttggccaggctggtctcaaactcctgacttcaagtgatctgcctgcatcggcctcccaaagtgctggaatttcaggcgtgagccactgcgcctggcctagatgtttttttctatgaagtgttcaggagattagcagtgtgggaagggcaccttcttggtctcaaaggagaactggcaaataagtttactggaaaaagaattttaaaacacattttcgttgttgttgttactgttgttgttgttgagacagggtctcactctgttatgtaggctggagtgcagcgtgtgattattgctcactgcaacctcgaactcccaggattaagagatcccctcaagtagctgggactacaggcacacaccaccacacccggttaattatttctattttttatagagactgggtctcgctttgttgcccaggctgctgtcaaactcctaggctcaagcgatcctcccacttgagcctctcgaagtgctgggattacaggcatgagccactatgcccggcctaaaacataatttcttgatactctgttttatggatataatataaccctattgttgaacatactgagtgttccgaataaacatctttgtgtatgggtattgtgatagtggattgtttctgaatgggaatataaacttactttttatttttgtttcttttttttttttgagatggagtcctcctctgtcgcccagctggagtgcagtggccatgtcttagctcactgcaacctccgcctcccaggttcaagcgattctcctgcctcagccttctgagtagctgggactacaggcgcgtgccaccacgccgggctggtttgtctttttagtagagatggcttacaacatgttggccaggttggtcttgaactcctgacctcgtgatccacctgcctcggcctcctaaagtgccgggattacaggcatgagccactgcgcccagctgttgtttctcttttttttttttttttttttttttggagttaaggtctcgccctgtcacccaggatggaatgcagtggcgtgatgtgatcatggctcactgcagccttgacctcccagtctcaaacaatcctcctgtctcagcaccccacccctgtccctgagtagctgggactacaggcatgtgccaccatgcctggctagttttttgtatttttttgtactgatggtgtttcaacattttgcccaggctggtctcaacgtcctggcctcaagcgacctgcctgcctaagcctcccaaagtgttgcgattacagtcgtgagccactgcgcccagccaggaatataacatttccttgctgcaggttgctcagttgtcctctagaaagataccattttagcttgccaccaacagtatattcagggctcaattcacagaaaagtgttcttgttttttgttgttgtttgtttgtgtgtttgttttgagatggagtctctgtcatccaggctggagtgcagtggtgtgatctcggctcactgcaacctccgtctcctgggttcaagcaattctcctgcctcagcctcctaagtatctgggattacaggcacacgccctactaatttttgtatttttagtagagacagggtttcaccatgttggtcaggtcggtctcaaactcctgacctcgttatctgcctgcctcagcctcccaaagttctggggttacaggcgtgagccaccgtgcccggcctgggtttttaagtgctttattattgtttgctaagaaaactgatttatctttttaagcattcattttatataaaacagtcattattctttttttttttggaggcagggtcttactctgttgcccagactgttggtgtgatcccagctcactgcacccttgacctctccaggctccagtgaccctcccacctcagcctcccgggtagctggtaccacaggtttgcgccaccatgcctggctaattttgtattttttgtagagacagggttttgccatgttacccggtctcccagagtgctgggattaaaggcatataccactgtacccagcctagaatagtcgtcattattatcttttttttttttttgcgacagggtctcactctgtcacccaggttggagtctgtggcacaatttcagctcactgcaacttctacttcccaggctcaagctatcctcccagctcagcctcctgagtagctgggaccacaggcgtgccccaccacgcctggctaattttttgtatttttggtagagatggggtttcgccatgttgctcaggctggtctcaaactcttgagctcaggcggtccacctacctcagcctcccaagttgctgggattacaggtgtgagcagtaattcttaataaagaacggtctagaacagtcattcttaatagaaggattgtgggccgggcacannnnnnnnnnnnnnnnnnnntcccaaagtgccggcattacaggcgtgagccaccgcacccagcctctcctactcttttacctggccaacatgtacttatctttcatgattcggttcagatatgtcctcttggactactctctaaatgtccaggctgatcaagtgcctctcttgtaggctcccaagatatccctctacccacaacacttagaccatatcgcactgatttaaaatatttacttatttgtcttcctcataaagctaccgtctctactaaaaatacaaaattagccgggcatggtggcacatgcctgtaatcccagctactcggaaggctgaggtaggagaatcacttgaacccagtaagcagaggttgcggtgagccaagatcgtgccattgcattctagcctgggcaataagagtgaaactctgtcccaccaccaaaataaataaataaataataaaggaattatggccgggcacagtggcttacacttgtagtcccagtatttcgagagactgaagcaggagtttgaggtcaggagtccaagaccagcctgggtaacatagtgagaccccatttctacaaaaaaatgaaaataaaaaattacctgggcatgaggatacatgcctgtagacccagctacttgggaggctggggcaggagaattgctgaagcccaggaggttgaggctacaatgagccataatcatgttattgcactccagcttgggtgacagagccagaacctgtctcatttaaaaaaaaaaaaaaaaaaaaagttggggagggtttgtggtccctgtgggttcatggaaagcccatggatttcaggaaatccatgggtctccctgaaattgaatgtaaaatgtggtgttttgtgtaattttctagaaaaagaggcctagtctgggtatggtggctcatgcctttaatcctagcactttgagaggctgaggtatgaggatcacttgaggccaggggttcaagactagccttggcaacaaatcgagactccatctctacaaaaaaaattaaaaaaataaggctaggcttggtggctcatacctgtaatcccagcactttgacaggatgaggcagctggatcacttgagcccaggtgtttaagacaatgctgggcaatatgacaaaaccctgtctataaaaaaaaaaaaatgcaaaaattagccaggtgtggtagggtgtgcctgtagtcacagctactcaggaggctgaggtgagaggatcacttgtgctcaggaggtggaggttgggatgagctgagattgcaccactccactccagcctgggcaacagagtgaggccttgtattaaaaaaaaaaaaagaagctgggcgtggtgtctcactcctgtaatcccagcactttgggaggccgaggcaggtggatcacgaggtcaggagatcaagaccatcctggctaacacagtgaaaccccgtctctactaaaaatacaaaaaattagccaggcgtggtgacgggcctctgtagtcccagctactcaggaggctgaggcaggagaatggcgtgaacccaggaggcggagcttgcagtgagccaagatcgcaccactgcactccagcctgggcgacagtgtgagactccatctcaaaaaaaaaaaaaaaaaagccagtcatgggggtgcatacctgttgtattagctactcaggaggctgaggcaggaggatcacttaggcccaggaagttgagcctgcagtgagctatgattgtgccactattgccctgtctaccctgggccccaaagtgagaccctgtctctaaaaaaagagagacataagggggtccaaggctcaaaaaaggttaagtaccactgctctagaggggaggattcccaagccctactgcccactaaaagtcagctgtggatgcatgccaagagacctaaacatttggcatagaaaattactaagctttggccaggtgcactggcttatgcctgtaatcccagcactttgggaggttgaggcgggtggatcatgaggtcaggagttcgacaccagcctggccaacatggtgaaacgccgtctctactaaaaatacaaaaattagccgggcatggtgacgtgtgcctgtagtcccaactgctcgggaggctgaggcaggagaatcgcttgaacccgggaggtggtggttgcagtgagccgagatcatgccattgcactccagcctgggtaacacagagagacttcatctccaaaaaaagggaaaaaaaagaaaaataaaaaagaaaattagctttatcaaaatgtataaaattctcgttaaagaatttcgagtaaggcgcggtggctcatgcctgtaatcccagaacgttgagaggctgaggcaggtggatcacttgaggtcaggagttcgaggccagcctggccaatatggtgaaacccaatctctactaaaaatacaaaaattaactgggcgtggtggcacgcgcctgtagtcccagctacaggctggggcaggagaatcgcttgaacctgggaggcggaggttgcagtgagccaagattgcgccattgcactccagcctaggcatcacagcaagactccatctcaaaaataaaaataaaaagaattagcagggcatggtagcatgcgcctgtgatctcagctacttgggaggctgaggcaggagaatcgctagaacccaggaggccgaggttgcagtgagccaagatcgtgccactgcactccagcctgggtgatagagcgagactctgtctcaaaaaaaaaaaaagcagaccaggtgtggtggctcacacctgtaatcctagcactttgggaggccaaggcaggctgatcgctggaactcaggagttcaagaccagcttgggcaacatggtaaaaccccgtctctactaaaaatacaaaaaaaatagccaggcatggagcaggcacctgtaatcccagctacttgggagggtgaggcacgggaatcgcttgaacccaggagatggaggttgcagtgagctgagatcgcaccactgcactccagcctgggtgacaaagcgagactctgtctcaaaaaaaaataataataataaataaatttcaacaaccatgtcaaacttaaaagttatattttaatgcctagaccttaggtgaataattctcttagtgtagctattaaaatgcctactgctctgtgtttagggtgggccatctggccaagcttcagcacatatgaggatgatgcacaaacagctagactatgaaagccctctttggcgtctgtgggatttcccatagaggggtgggtacatctgacatctgtgttctcctggccctgcaggctcacgtgatggttctatgggactctgggaggtgacagatgatgttttgaccaaaagtgatgcgagacacaatgtgtcacgggtccctgtgtatgcacacatcactcacaaggccttaaaggacatccccaaagaagacacaaaccctgacaactgcaaggttcgggctctggccttcaacaacaagaacaaggtatgaacttgtgtagggatccctgacgtgtattcctcttgcttatgtcttgggatatgcactcctttttccttccccatcagtgcttgctacatagcatggttctgagcccacagaacacctcttaaaggctgagtgatgctggtgagaaattataactgaggctctgaaacccaccccttcaattggtgtctgcagtatttctctgagtagtctatatttgtgggtcagcctcacagaattcccctagggccaccctgatttgactgtctgtcatttgcacatgcctttgcaggtgctgtattctgggcatgattttcatacttgcttctgaaaacaatcactttttttctctttggtattcattcctttttttttttttttctttttgagactgtgttttgctcctgtcacctaggcaggagtgcaatggcacgatctcagctcaaagcaacctccaccttccaggttcaagcaattcttctgcctcagattctcaagtagctgggactacaggcatgcaccgctacacatggctaattttgtattttttagtagagacggggtttcaccatgttggccaggctggtcttgaactcctgacctcagttgatccactctccttggcctcccaaagttctgggattacaggcgtgagccaccatgcctggccagtattctttactgcctactttcccttcacatttccactaagtcttaccttattgagtcagatctgatgctgaggttttaataaagcagagtgtcacccaggcgcagtgactcacgcctgtaatccctgcactttcggaggccgaggcaggcagatcacaaggtcaggagtttgagattagcctcggccaacatggtaaaaccccatgtttactgaaaatacaaaaaaattagccaggcatggtggcatatgcctgtattcccagctactcaggaggctgaggcaggaaaactataggaggtggaggttggcagtgagccgaaattgcgccacagcactccagcctgggtgacagagcaagactccatctcaaaaaaaaaaaaaaaaaaaaaaagcagtgtcagaatatacacccagagccagagaaaggcttctccagaatctgaatcaggccacagtttgaagggtagttccctcaacctcctatcccatctgtatttatggcctaagggtagattaatctctcctaaattagagtcttcacttatagaaattctcacactagattatgaaactgtccttcacatatgtgccctgctttaactctccaacaggacgttgagggagtgatagcatagtgaggagtttttcaaccatgggtgcctgtgttattgctggcagcctcaatttaatatgccattcagctaggttctgtagggtgaagtaatggtctaataattactggcacctctgctggaatcatcacgagacaggaataaaggaccctgaccttagaatcctcgcctgcttattatcgtacattagttgctatagatgataatataacctggttttcattgctcttgtaggaactgggagcagtgtctctggatggctactttcatctctggaaggctgaaaatacactatctaaggtgtgatgaacatgattttgtggttttacctaataattcaccttacagttaaaatactgtaattctagctgagcttttttttcatgtttattttatctattcatttatttttgaggcagagtctcgctctgatgcccaggctggagtgcagtggtgcaatcttggctcactgcaacctctgcctcctgggttcaaccagttcttgtgcctcagccacctgagtagctgcggggattacaggcgtctgccaacatgcccaggtattttttttgtatttttagtaggaacacagtctcaccatgttggccaggttggtatttttatttttaaagacaataaatacagggtctcactctgtcacccaagttggagtgcagtcatggctcatggatcagtgcagccttgaactcctgggcataagcgatcctcttgcctcagcctcccaagtagctgagactatgggcatgtgtcaccacacccatctggttgttttttttgttttgttttgtttttttaattttttgtagagacagagtctcactatgtttcccaggctggttttgaactcctgacctcaagcgatcctcccaccttggtctcccgaagtgctgggcattcaggcatgaaccattgcacctggtctcaattcttgtttaaaagaccagttctccaaaggcctgggcatgtttttgcacagtacatgaaattttgagtctggtgtgcctctcttgcaggaaagtcttttaaagagtaagacagggtgattctttcctattgcataagcttcctgagaggctcctttgactagcagtcctcctcaacaatgcatttaagtatttctttatagattgatgactacttggcatgctgtaagggaaggaaatcctgagtgttaggaacctttggcaattgaagatcgatcaaattaagataaaccatctctgaaataatcatgtaaggtaatgagaaaatagacttaatttacaatacaaattggtcatccctaatccagaatgctccaaaatccagttgggcacaataccttaggcctgtaatcccaacactttgggaggttgaagcaggaggattgcttgagcccaggagttcaaaactagcctgggcaacacagtaagaccctatctctgcaacaaaatttaaaaattagccatacattgtggcatatgcctgtagtcccagctactggagggtagcagtgctgaggcaggaggaccacttgagctgaggaggtcaaggctgcagtgagccgtaattttgccactgcactccagcctgggtgacagagcgagaccctatctcaaaaaaaaaaaaaaaaaaaaaaaaaaggcctggcgcggtggttcacgcctataatcccagcactttgggaggccgaggcaggtggatcatgaggtcaagagattgagaccatgctggccaacatggcgaaaccccgtctctactaaaaatacaaaaattagctgggcgtggtggtgggcgtctgtagtcccagatacttgggaggctgaggcaggagaatcgcttgaacccaggaggcagaggttgcagtgagccgagatcatgccactgcactccagcctggcaacagagcaagactctctctcaaaaaaaaaagcctccaaagtccaaaactttttgagcaccaacacaatgccacaaatggaaaatttcacatgggacacctttgctttctgacaggtcagtgtaccaaacattgtttaatgcagaaaattatttaaaatattgcataaaattaccttcactctatgtgtataagatgtatatgaaacataaatgaattttgtggttagacttgggtgccatccccaagatagctccttacatatatgtagatatttaaaaatcggggccgggtgcggtggctcacgcctataatcccagcactttgggaggccaaggtgggcggatcgcaaggtcaggagattgagaccatcctggctaacatggtgaaaccccgtctctactaaaaatacaaaaaattagccgggcgtggtggtgggcgcttgtagtcccagctacccgggaagctgaggcaggagaatggtgtgaacccaggaggtggagcttgcagtgagctgagatcgcgccactgtactccagcctgggcgacagtgcgagactccgtctcaaaaaaaaaaaaaaaaagctggagaaatccgaaattcaaaacatttgtagtcacaagccttttggataagggagattcaacaagcaacttttacatagagttaaacctacctgtgaatcatttgtcttttttttattttttttgagacagagtctcactttgttgcccaggctagaatgcagtggcacgatctcagctcactgcaacctccgcctcccaggttcaagtgattctccttcctcagcctcctgagtagctgggattacaggcatgcaccactacccctagctaatttttggtatttttagtagagatggcatctcaccaggttggccagcctggtctcaaactcctgacctcaggtgatctgcctgccttagcctcccaaagtgctgggattacagacgttagccaccacgcccagctttttctcttcttcttatccttgaggactttgcaagaggaagcagggttccaggaattagtgattccttcatgtcacaatagcctttgagctccactgaccttgtatgctgtcttatgtgttgtatgcacccactgaggatttgctaactgacgaagacccagggttaaggctgatgtgggttatctgggattaagctagtcccatgggcgtgctttctatagcgtacaattcccattcaggtgggaaggtgagctgggggtagccagagatcagcctctttatctgaaaagcactgaggtggcccttcctggcagacagaacagagtgggactatggctttagtgccctggaacgattcccagaaacaacctgaatagttgaaacagcctaccaagaaaggccttggcctttccagctacttctgattatttattccagatttaccttttccccaacctatctccttcagtatctaggtcttaccgtttattaacattcacctcctctttctcctgtatacctaggggtggaacagagtgttatttctgtaatcagggcttgattttatgtggcttttatatgagggaagcccatcaaggtgggagtccagaaacaatatccctgccttaccctctctgctgatgccatggttatatctctcctctattttcagctcctctccaccaaactgccatattgccgtgagaatgtgtgtctggcttatggtagtgaatggtcagtttatgcagtgggctcccaagctcatgtctccttcttggatccacggcagccatcatacaacgtcaagtctgtctgttccagggagcgaggcagtggtaagagtccctgtgtgcacctcaggcctacagctgcactgcatatgggttctgactttcagtttctttgttggtttccaaacaggtatagtgctctgtatggaacatttggaagtgtgttcaaaaaggggagcgatggctaggcgtggtggcttacgcctgtaatcccagcactttgggaggccgaggcgggtggatcacctgaggtcgggagtttgagatcagcctgaccaataaatatggagaaaccccgtctctactaaaaatacaaaattagccgggcgcagtggcgcatgcctgtaatcccagctgctcaggaggctgaggcaggagaattgcttgaacctgggaggcggaggttgcggtgagctgagatcgcaccattgcactccagcctgggcaatgagcgcgaaattctgtctcaaaaaaaaaggggtgtggggggagtgacacaaaagggcactagactttcaaacaccacagacaaatgtgtggccacagaagcctttgttgggagccaccagtcaggatattagttagtagtttccatgttcttttagaaagctctactttttttttgttgttgttgttttttttttttgagacagagtctcgctcttttgccaggctggagtgtagtggcgtgatctcagctcactgcaacctctgccttctgagttcaagtgattctcctgcctcagcctcgcgagtaggtgggactacaggcacacaccaccacgcccagctaatttttgtatttttagtagagacggggtttcaccatgttggccaggatggccttgatctcttgaccttgtgatccacccacctcggccttccaaagtgctgagattacaggcgtgagccactgcacctggccgagagccctactttctatcctgtggtaatttttttgctgtggtcctgcctgaactaaaattctatttatgctaagatgtggcatggtgggataaggaggaagtttacaaagggcatgaggaaacctcagggtaatgagtatgttcattatgtagattgtggttatgatgtcatggatatatacatatgtcagaacctcaaattgtatactttatgtgtcgtatattgtatgacaaacctcaataaggctgaagaaaatactgagtttagttctgaccactgagtaaattaagcttccacctcaaatcttttataacatattctctgtaagagcaccctcattctttattgaagagggaaaaaatacttattttagtgtactttgaaggtttcaaaatacctttttctgacatgccatttcatcataccaagaaccctgtgggaagcagatgagaaaacatagttttacatataagacctagagccagctaaataacttgcccagcatcacacagcttgatgggggaacagctagggaccagaatccaacttaacaaattgtattttctttatctcactttatcccatttctcgctttatcccatttctcatgcaaaaatatggctgtgttatcctgagagtcctaaaaggcacactgtggattgcagttcaccctctctttttcaagtagtgtttattcctgtgcagatactgcaaagtagcttttgttttgggttttttgtggttttttttttttttttttttttgaagacagggtcctcactctatcagccaggctggaggaaagtggtgcaatctcagttcactgcagcttttccacctgccaggctcaagcagtcctcccacctcagcctcccgagtagctgggactataagcgtccgccacctcattcagctaatttttgtatttttgtagagacaggttctcatcatgttgcccagagttgtctcaaactcttgggacacccacctcagcctcccaaagtgtgtgctaagattacagggattacagccgtgagccactgtgcccagctatttcttttttgttgttgttgttgttgagatgagtcttgctctgtcacctaggctggagtggagtggtgtgatctcagctcactgcaccctctgcctcccaggttcaagcgattctcctgccttagcctcctgagtagctgggactacaggcgcgtaccaccatgcccagctaatttttgtgtttttagtagagatggagtttcaccatgttggccagactggttttgaactcctgacctcaagtgatccactcaccttgggcctcccaaagtactgggattacaggcttgagccaccacgcctggcctatttgttcttaattatagttaaaatgcttacattttagaacaaagaataatgtataatgagagtagtagagaaaggaataaatagggccgggcacggtggctgatgcctgtaatcccagcactttgggagcctgaggcaggtggatcacctgaggtcaggagttcgagaccagcctgatcaacatggtgaaaccctgtctctactaaaaatacaaacaaaattagctgggggtggtagcgggtgcctgtagttccagctacttgggaggctgaggcaggagaatcacttgaatctgggaggtggaggttgcagtgagccaagattgtgccacagtactccagctttggcaacagagctcaaaaaaaaagagaaaagactaaataggtttggctctaataatgtatgcaatgaaaagttttaagagatttttggtactgtttaatgggggtaactttcatacctaataaggaaatactggttccacaaatattatccagttcttatgtgccaagagacatcttcatatcccaagcactgatttgatccccaagtacagcagatgtgttttccttgtgatctaaagtaattacatgacttgtcttaaacatctttgggtatttaagttctgggctttttgccactctcaaaacacctaatactagataaagacttcttgcattgtggccgggcacagtggctcatgcctataatcccagcactttgggaggccaaggtggatcacttgaggtcaggagttcaagaccagcctggccaacatggtgaaaccctgtctctcctgaaaatgcaagaattagctgagtgtgatggcaggagcctgtaatcccagctacttgggaggctaaggcaggagaatcgcttgaacccggaaggcagaggttgcagcgagccaagatcgcgccattgcactccagcctgggcgacagagcgagactccatctcaaaaaataaaaaaagacttcttgcatttgccacagtagtggttttaggtgaaatataaggaatcgttgatgacttaatgatttataaatatgcagattaccttgagttgcagtgtaggttggaaacatatgatggagaaaagcttagagttatgaaagatgatcccagagtgagttgagaggaagcaaggaagttctcagcacttatggtcttcggccaaaagcatcttgagcatcatcgggaatctgacacttttccaaggcttcttggatggtttctgtcagtgtgtggataggcaggatggcatcaggattctctttgcttttgcatgagctaacttgccattgggaaaacactgtctgatactttgtggggcgggtggaggggagcagggtggacgttgaaaactcagtgttggagaaattcaggctagcagacagtcagcaaatattctctcccgcctcactgccttttacttttctgtctttcaggaatccggtcagtgagtttctacgagcacatcatcactgtgggaacagggcagggctccctgctgttctatgacatccgagctcagagatttctggaagagaggctctcagcttgttatgggtccaagcccagactagcaggggagaatctgaaactaaccactggcaaaggctggctggtgcgtaagcccctacctgagatgactgctacacagtaacagaaaaattatcttcctctatctctcagcccccactgacacaccatctactcatactttttcactagtaagaggcactcattggaacaggaaaagacttcccccgattttgcttttatgtctgcacgttgcctgtgggaaaactgaggcccagtaaaacacactggttgacttaggattttccccaaggtgtaatagagcaagaaggataagggacctcccaccacagctgtcagtgaattttttttttttttttttttttgagacagggtcactctgttgcccaggctggagtgtagtggtgtgatcatagcttactgtatgtagccttgaactcctgggctcaagcagtcctcctgcctcagcctcccaagtagctgggaccacaggcatatgcactgtgcccggctaatttatttttttttagtagagatggggtctcgccatgttgcccaggctggtctcaaactcctgggctcaagtgattctctcaccttggcctcctaaaattctgggattacagccatgaaccactgcgccccacctccagtgaattattcaagtgtttggttcttcctcctgtgcctagcaggtggagggaaaacagaactttggttctaagtctcctgagaagaactgagccttgtatagcaattcttcagctgctccgttcttctctaacgtttagttggaaaaatgaggccctgattcccatgagaaccaaccagccaatctcctgacatgaggttgtacctgtagaaccctgttcccttaaggagaccagaaagcattcctgtcccttcctcccccttttcctgccccatggctagaggtgctaattgtagtctctttctcttcccgtagaatcatgatgaaacctggaggaattacttttcagacattgacttcttccccaatgctgtttacacccactgctacgactcgtctggaacgaaactctttgtggcaggaggtcccctcccttcagggctccatggaaactatgctgggctctggagttaatgacaactccccaaatgcagagatttacactaacttccattctcagtttccttgtttcttttgattttttttttcctaattgtgtgaggctcttgtgttttagtgggaacaccaaagtttgcctatagtttaggcacttaataggaagaagctctgtacagaaatctgaaagttgttttgctttttgttttcccctttggtaatcaaaattttactatcttttattatttctggcttttcaaccaaacattgttgctaatccctatttttctttaagtgacacacattctcctgtctctggcttcttcaggctgaaatgacatagctcacccttacttcactcttgagaggtagggctcctttataattacatggttgctctcagactttctgtgaaagtttgggagctgtgtgtgtctgtgtgtgtgtgagagagagatcttgtctgcgtgtgtgtgtgtgatcttgtgtgcctgtaggtactgtgtgtcactgaaattacctggagtgaggattacttgtaattaaaatatttataaaagaaacaactttattcacagagtccagctttgggactagtctgtatcttgttttttaagtctaacaacactgataataggaagtaaaaacagaaaggaaaagaaattaccactgggaaaatctttttagttagattgtaggcttcctggggcctcccatgccaggactgcaaagtgatccagccctacctgtcttcccacctgtgtgtcccccgtgtgggaagttggtgtcacttccccttcccaccctcacatctgcttagccagtagccacacccctaaaacatcagactcaccatccaggtgcagctccagaggctacaaaaggcttcatgggacttgaatccccatcctagcttctctctccttcccctcaagacctgatctggttttaaggggcctggagctgggagtctcaagtctgctaagattcacatccatagcccccatggctttgaggagaatcctctctgccattcttccaatctccccagtgggttttgctattattttctaaattgggttaagtctaagaaggtgggggtgagcagggggtttatctgtgtgtagtgagtgcttcatgtgtggaatattcattttcttactgcagtgggacttggggttgaagccacccctcctactctgttggcttagccctgagatggtgacaggctggcctgcagtcagcatcattgtgcatgtgacagcatcaatgtgattagtaatttgtctgttcctcccttgaactgtctgtttagtctgaggtttttaaacttgcaggcagctgactgtgatgtccacttgttccctgatttttacacatcatgtcaaagataacagctgttcccacccaccagttcctctaagcacatactctgcttttctgtcaacatcccattttggggaaaggaaaagtcatatttattcctgcaccccagttttttaacttgttctcccagttgtccccctcttctctgggtgtaagaagggaaattggaaaaaaaattatatatatattctccttttaatggtggggggctactggagaggagagacagcaagtccaccctaacttgttacacagcacataccacaggttctggaattctcatcttcgaacctagagaaataggtgctataaacagggaattaagcaaaatgctggatgctatagatcttttaattgtcttaattttttttctattattaaactacaggctgtagatttcttagttctcacagaacttctatcattttaaactgacttgtatatttaaaaaaaaaatcttcagtaggatgttttgtactattgctagaccctcttctgtaatgggtaatgcgtttgattgtttgagattttctgtttttaaaaatgtagcacttgactttttgccaaggaaaaaaataaaaattattccagtgcacaatggtgtgagtgagtattgtgtagccaggagcctgccaaaaaggccccacatgactagttggaaggttggcttgagctgttgggattgcttgtggcagaaggggaacacaagccattacctccaggttagaggcaggtcaagtgcaggcacaaatactaagacctgcttgctctgggtccccaactctagcccaagatgagttgctctgaggtccagctgagggtggatatgcccagggtactgaagtagtgtgacgttacttctgttacataagtaagggttggtaataggccctgtctgcttggatggtgccctgagaatgacgctgaaagtgcttgcatagtactctgggaataggatattaatttttgttttttgtagttggaaccatagaccttcactgccctttgtaaggggaagacacagtgaccacagtgagtgatgctcttctagagcctatttggagctgtagctgagagaaactgccaaatcataccacccttcctcacacagtcatctctgggaaacccaccagggctaggccgcagagcctggcaaggccgtccctattcttctgccacatggtacttgttctttccagggcaagctggacacagctgctctatgcacctgccttagagactgactggttcagaacatgacacatgggttcctatatgatcaaaggctgcaagacaggaaggggagatgagtaagttaaagcaatttgagagggctccccagaggagacgagttacatttggaaagggctgaaactagcctttcccaaaatgaatttagaaggtatttgtaaaatcttcattgtcagccgggtgcagtggctcacacctgtaatcccagcactttgggaggcccaggtgggtggatcacctgaggtcaggagtttgagaccagcccagccaacatggtgaaaccccatctctaccaaaaatacaaaaattagctgggcgtgttggcgggtgcctgtaatcccagctattgggaggctgaggcaggagaattgcttgtacctgggaggcagaggttgcagtgagccgagattgtgccactacactccagcctgggcaacagagtgagactccatctccaaacaaaatatattgtcaaatcatttttgggaaatgcagattagaacaaaagcagcttcattcctttaccatcaggtttttttatttttaaaaattggaaaggagagctttatttctcaaagggttgcagtctgcagggtggccattctgacagtctgggaagtacagcctctggccagaagtcagaaacacaaactgagggaggggcaaaggggacaggaatttatgttgaacaaggtggctgaatatatgtatttaataagctataggaggagtcatgaatatttataaaaggaaaaaggtacacatgtgcaactgaactcttaggtttttggtattttactatgggacttgttccatagaacatgctcacaaagaaaggtgacttagggaatgtggggttgacttggtctaggcctctggcctccatggaatcttggccttgctcccactttccagccagactttccagcaaagcatgtatcacagaagggctttgtgggctttatggggtccctttttagccagcagtccctactcccttctgtgaaagaacttcttgttctctctcaggcacttcttgttctgtctcaggccgcatgccacatgccttattccaaatagtctgctggctcctcatcctttgggtccttctacaggaggctttgtagctgaactgaattcttagcccttcatgacttgtttatgctccaagtccctggtcccctgccaactctaattgattattgatctggccctgtgttcctaataaaactaaagactgcccgcagtccaggccactctgatccagctgccattcctcgtgcagatacccagaaatagcaagtcaggatgtccatacctgtatcagcaccagggatcaatcttttaggagttagcctacgatccaagtgtttttgttctgcttttcagttgctggtatctagaagacaacaatgaggagtggggggtggacaggagaaggaatcactcagtgttatttgcttcatgctagttcattcatatctttcttcacgctagtgtgctgagataactgaaatgtttgggaggatggaaacataggctgctaattctgaaaccagtgatgaagacaataaattgctcaggtttcttagcttggttctgcccttagctcctccaaagaagaatccaatgaaagaaatgtgagacataggaatactaccactggagagaaaggtgtgaactgaactcaagatggagatggagttgtgagctcttttatgattccactctccaagagaggtgtggactatcctctatcagaatccccctgggttgggcctcacatctgaacactcttcttgattagtgtggaactgccgaagtcaggatttttaaggcataataatactatttaacagtactcaggccgtgtgcagtggctcacacctataatcctggcactttaggaagccgaggcaggcagatcacgaggtcagaagatcgagaccatcctggccaacatggtgaaaccctgtctctactaaaaatacaaaaaattagctgggtgtggtggctcgtgcctgtaatcccagctactctggaggctgaggcaggagaatcgcttgaacccaggagttagaggttgcagtgagtcgagatcacgccactgcacttcagcctggcaacagagagagactccgtctcgaaaaaaaaaagtgctcatagtcacatgtttactatgcttcttgttaagctgtaaggtgtattcagagctataattaacattgctagcgctatggacaggaagaaaacagatgatcaactcataccttaaaataaactgagctgggtgcagtggcttacacctgtaatcccaacactttgggaggctggggtggattgcctgaagccaggaatttgagaccaatctggccaacatagtgagaccccatttctacacataattaattagccttgcatggtgatgcccacctatagtcccaggtacttgggaggcagagacaggaagatcacgtgagcccaggagtttaaggctgcagcgcgccaggattgtgccactgcactccagcctgggcaacagagcaggaccctgtctcaaaaaaaaaaaaaaaaagaaagaaactggccaggcgcagtggctcatgcctgtaatcccagcactttgggaggccaaggcagaaagattgcatgatactaggagctcaagatcagcctgggcaatatagcaagacctggtctctacacaaaattgaaaacttagccaggcatgatggtgcacaggaagactgtttgagcccaggagtttgaggctgctgtgaactatgattgcgccactgcactccaacctgggtgacagagcaagaccctgtctcaaaaaataataataggctaggcgtggctgctcacacctgtaatcccagcactttgggaggccgaggtgggcagatcatctgaggtcaggagtttgagaccagcctggccaacatggcgaaaccccacctctaccaaaaaatacaaaaattagccgggcgtggtggtgtgctcctataatctcagctactcaggaagctgaggcaagagaatcgcttgaacccaggaggcagaggttgcagaaagccgagaccacaccattgcactccagcctgggcaacagagtgagactccgtctcaaaaaaaaaattctccccttgggcctcgagaaagagcattgcatgagattggcgtcttgttttcagagttctggactccaaaactatgagagaatgactctgttgttttaaaacccaccaagttaggctgggcacagtggctcatgcctctaatcccagcactctgggaggctgaggcgggtggatcgcctgagctcaggagttcgagaccagcctgaccaatatggtgaaaccccgtctctactaaaaatacaaaaaattggccgggcgtagtggcatgcacctatagtcccaactactcgggaggctgaggcaggagaattgcttgaacctgagagatggaggttgcagtgagctgagatcgtgccactgcactccagcctaggcgacagagcaaggctccgtctcaaaaaaaacaacaaaaaacaacccaccaagtttgtggtaatttagaagtattctgaggaatttttagataccaatttttgtaaaatcacactagatcaaaggaaaatattttctcttacaataatacacagataaactgtaatattagtgctaagacttaaaaaagcaaaaagtaaagctcagaaccatgactgaattgatactggaggaagtgatcatcaaatctgcataccactggttgctttttcctacctatttcaaactatctcaacttttttttttttttttgagacagagttttgctcttcacacccaggccagagtgcaatggtgcgttctcagctcactgcaacctccgcctcccaggttcaagtgattctcctgcctcagtctcccaagtagctaggattacaggcgcccaccaccacacgtggctaatgtttgtattttaagtagagacagggtttcaccatgttggccaggctggtctcaaactcctgatccaccacattggcctcccaatgtgctgagattacaggcgtgagccaccacacccggccctttttttttttttttttttttaaagcagagcctggctttgtcacccaggctggagtgcagtggtgcaatctcagctcactgcagcttgtgcctcctggattcaagtgattcttgtgcctcagcctcctctgaatagctgggattacaggcacacaccaccacacctggctaatctttgtatttttagtagaggaggggttttgccatgttgcccaggctggtctcaaactcctgacctcaagcagtccgcctgccttggtctcccaaaaagtgctgggattacagacttgaaccaccgcgcctggtcaatgttgtttttttgtttgtttgattttctgtttgttttttcttgagacggagtctcaggctgtcacaaggctggaatgcaatggcatgatcttggctcgctgcaacctccaccgcccaggttcaagcaattctcctgcctcagcctaccaagtagctgggattacaggcgtgtgccaccatgcccagctaattttgtatttttttctttttcttttttttttttttttttgagacagagtcctgctctgccacccggaatggagtgcaatggcatgatctcagctcactgcaacctccgcctcctcggttcaagcaattctcctgcctcagcctcccaagtagctgggactacaggcgcctgccaccacatctggctaatttcttttttttttttttttgagacagagtttcgctcttgttgcctaggctggagtgcaatggcgcaatcttggctcactgcaacctccacctcccaggttcaagcgattctcctacctcagcctcctgagtagctgggattacaaacatgcgccaccatgcccagctaatttttgtactttcagtagagatggagtttctccatgttggtcaggctggtctcgaactcccaacctcaggtgatccacccacctcagcctcccaaagtgctgggattacaggcgtgagccaccgcgcccggctaatttttgtatttttaatagagacggggtttcaccatattggccagactggtctcgaactcctgacctcatgatccgcctgcctcggcctccaaagtgctaggattacaggcgtcagccaaggcgcctggccattttttttcttttttttctaaacagagtctcactctcgtcaggctggagtgcagtggcgcgatcttggctcagtccaacctctgcctcccgggttcaagcgattctcatccctcagcctcccgagtagctgagtctctatgcccgtgccaccatgcccagctaattcttgtatttttagtagagacgggatttcaccagcgtctggccaggatggtctcaatctcttgacctcatgatctgcccacctcagcctctcaaagtgctgggattacaggcgtgagccaccacacccggccttaatgttttttttttttttaaacagagacagggtttcgccatgttgccaaggctgatctctcaaactcttgagctcagatgatcctcctgcctgccttgtcctcccagagtgctgggattacaggcgtgagccaccgtgcccggcctaatttttgtatttttaatagagacagggtttcaccatattggccaggctggtctcgaactcctgacctcatgatccgcctgtctcggtctccaaagtgctgggattacaggcgtcagccaaggcgcctggccattttttttcttttttttctaaacagagtctcactctcatcaggctggagtgcagtggcgcaatctcggctcaccccaacctctgcctcccgggttcaagcgattctcctgcctgagcctcccgagtagctgggtctacatgcccatgcaaccatgcccagctaatttttgtatttttaatagagacgggatatcaccagcatctggccaggatggtctcgatctcttgacctcgttatccgcccacttcagcctcccaaagtgctggaattacagacccgagccactgcaccgagcctatctcaacattttgaacttgtactcgaagacatcctttcaaagtgcaggttgtagagttttaggatgctttctcatcttgaacaagccaagaaaacgtacagctatcttgggtctcctttgatagcagaagataataagagatctagctaagacctgagatacctaaacttgccttgctatggaatctgccttgcaggcacctgggcagacctagagttgctagccaggatgtcataggattctcaaagatgatggaggttgcgtgagtcatcacagatgatgtcagctttgatgttattgttctgaggctatcagtttatttaactggtgactgtggtctttatcaggaactcttagcctatcaaatggtatttatggtgttgaaaaattagtattattttttgagacacagtctcactctgttgcccaaactgtacctgggcctattgttttgtgtttgtttgtttgtttgttttttgtcgctcaggctggagtgcagtagcacgatttaggctcactgcaacctccgcctctctggttcaagcaattcttctgtctcagcctcccaagtagctgggactacaggcgcctgccaccatgcccggctaatctttgtattttttttttagtagagacggggcttcaccatattggtcaggctnnnnnnnnnnnnnnnnnnnnnnnnnnnnnnnnnnnnnnnnnnnnnnnnnnnnnnnnnnnnnnnnnnnnnnnnnnnnnnnnnnnnnnnnnnnnnnnnnnnnnnnnnnnnnnnnnnnnnnnnnnnnnnnnnnnnnnnnnnnnnnnnnnnnnnnnnnnnnnnnnnnnnnnnnnnnnnnnnnnnnnnnnnnnnnnnnnnnnnnnnnnnnnnnnnnnnnnnnnnnnnnnnnnnnnnnnnnnnnnnnnnnnnnnnnnnnnnnnnnnnnnnnnnnnnnnnnnnnnnnnnnnnnnnnnnnnnnnnnnnnnnnnnnnnnnnnnnnnnnnnnnnnnnnnnnnnnnnnnnnnnnnnnnnnnnnnnnnnnnnnnnnnnnnnnnnnnnnnnnnnnnnnnnnnnnnnnnnnnnnnnnnnnnnnnnnnnnnnnnnnnnnnnnnnnnnnnnnnnnnnnnnnnnnnnnnnnnnnnnnnnnnnnnnnnnnnnnnnnnnnnnnnnnnnnnnnnnnnnnnnnnnnnnnnnnnnnnnnnnnnnnnnnnnnnnnnnnnnnnnnnnnnnnnnnnnnnnnnnnnnnnnnnnnnnnnnnnnnnnnnnnnnnnnnnnnnnnnnnnnnnnnnnnnnnnnnnnnnnnnnnnnnnnnnnnnnnnnnnnnnnnnnnnnnnnnnnnnnnnnnnnnnnnnnnnnnnnnnnnnnnnnnnnnnnnnnnnnnnnnnnnnnnnnnnnnnnnnnnnnnnnnnnnnnnnnnnnnnnnnnnnnnnnnnnnnnnnnnnnnnnnnnnnnnnnnnnnnnnnnnnnnnnnnnnnnnnnnnnnnnnnnnnnnnnnnnnnnnnnnnnnnnnnnnnnnnnnnnnnnnnnnnnnnnnnnnnnnnnnnnnnnnnnnnnnnnnnnnnnnnnnnnnnnnnnnnnnnnnnnnnnnnnnnnnnnnnnnnnnnnnnnnnnnnnnnnnnnnnnnnnnnnnnnnnnnnnnnnnnnnnnnnnnnnnnnnnnnnnnnnnnnnnnnnnnnnnnnnnnnnnnnnnnnnnnnnnnnnnnnnnnnnnnnnnnnnnnnnnnnnnnnnnnnnnnnnnnnnnnnnnnnnnnnnnnnnnnnnnnnnnnnnnnnnnnnnnnnnnnnnnnnnnnnnnnnnnnnnnnnnnnnnnnnnnnnnnnnnnnnnnnnnnnnnnnnnnnnnnnnnnnnnnnnnnnnnnnnnnnnnnnnnnnnnnnnnnnnnnnnnnnnnnnnnnnnnnnnnnnnnnnnnnnnnnnnnnnnnnnnnnnnnnnnnnnnnnnnnnnnnnnnnnnnnnnnnnnnnnnnnnnnnnnnnnnnnnnnnnnnnnnnnnnnnnnnnnnnnnnnnnnnnnnnnnnnnnnnnnnnnnnnnnnnnnnnnnnnnnnnnnnnnnnnnnnnnnnnnnnnnnnnnnnnnnnnnnnnnnnnnnnnnnnnnnnnnnnnnnnnnnnnnnnnnnnnnnnnnnnnnnnnnnnnnnnnnnnnnnnnnnnnnnnnnnnnnnnnnnnnnnnnnnnnnnnnnnnnnnnnnnnnnnnnnnnnnnnnnnnnnnnnnnnnnnnnnnnnnnnnnnnnnnnnnnnnnnnnnnnnnnnnnnnnnnnnnnnnnnnnnnnnnnnnnnnnnnnnnnnnnnnnnnnnnnnnnnnnnnnnnnnnnnnnnnnnnnnnnnnnnnnnnnnnnnnnnnnnnnnnnnnnnnnnnnnnnnnnnnnnnnnnnnnnnnnnnnnnnnnnnnnnnnnnnnnnnnnnnnnnnnnnnnnnnnnnnnnnnnnnnnnnnnnnnnnnnnnnnnnnnnnnnnnnnnnnnnnnnnnnnnnnnnnnnnnnnnnnnnnnnnnnnnnnnnnnnnnnnnnnnnnnnnnnnnnnnnnnnnnnnnnnnnnnnnnnnnnnnnnnnnnnnnnnnnnnnnnnnnnnnnnnnnnnnnnnnnnnnnnnnnnnnnnnnnnnnnnnnnnnnnnnnnnnnnnnnnnnnnnnnnnnnnnnnnnnnnnnnnnnnnnnnnnnnnnnnnnnnnnnnnnnnnnnnnnnnnnnnnnnnnnnnnnnnnnnnnnnnnnnnnnnnnnnnnnnnnnnnnnnnnnnnnnnnnnnnnnnnnnnnnnnnnnnnnnnnnnnnnnnnnnnnnnnnnnnnnnnnnnnnnnnnnnnnnnnnnnnnnnnnnnnnnnnnnnnnnnnnnnnnnnnnnnnnnnnnnnnnnnnnnnnnnnnnnnnnnnnnnnnnnnnnnnnnnnnnnnnnnnnnnnnnnnnnnnnnnnnnnnnnnnnnnnnnnnnnnnnnnnnnnnnnnnnnnnnnnnnnnnnnnnnnnnnnnnnnnnnnnnnnnnnnnnnnnnnnnnnnnnnnnnnnnnnnnnnnnnnnnnnnnnnnnnnnnnnnnnnnnnnnnnnnnnnnnnnnnnnnnnnnnnnnnnnnnnnnnnnnnnnnnnnnnnnnnnnnnnnnnnnnnnnnnnnnnnnnnnnnnnnnnnnnnnnnnnnnnnnnnnnnnnnnnnnnnnnnnnnnnnnnnnnnnnnnnnnnnnnnnnnnnnnnnnnnnnnnnnnnnnnnnnnnnnnnnnnnnnnnnnnnnnnnnnnnnnnnnnnnnnnnnnnnnnnnnnnnnnnnnnnnnnnnnnnnnnnnnnnnnnnnnnnn

SEQ ID NO: 842 - DNA, 3654 bp, Homo sapiens
tatccgaagtgcggctgcgcaagggtgacggcgcgcgagcaagggggagggggtgttttggttctagccgctcgccgtccttgcaggctctgccgtcggaaagccgctcattctcgcttccccttccctttcccggctcaagtccttcctctctctttcctttctttccgcctatcttttttctgctgccgctccgggtccgggccattttccgggccgggcgcactaaggtgcgcggccccggggcccagtatatgacccgccgtcctgctatccttcgcttcccccgccccatgtggctgcggggccgcggcggcgctgcccactatggcccggaaagtagttagcaggaagcggaaagcgcccgcctcgccgggagctgggagcgacgctcagggcccgcagtttggctgggatcactcgcttcacaaaaggaaaagacttcctcctgtgaagagatccttagtatactacttgaagaaccgggaagtcaggctacagaatgaaaccagctactctcgagtgttgcatggttatgcagcacagcaacttcccagtctcctgaaggagagagagtttcaccttgggacccttaataaagtgtttgcatctcagtggttgaatcataggcaagtggtgtgtggcacaaaatgcaacacgctatttgtcgtagatgtccagacaagccagatcaccaagatccccattctgaaagaccgggagcctggaggtgtgacccagcagggctgtggtatccatgccatcgagctgaatccttctagaacactgctagccactggaggagacaaccccaacagtcttgccatctatcgactacctacgctggatcctgtgtgtgtaggagatgatggacacaaggactggatcttttccatcgcatggatcagcgacactatggcagtgtctggctcacgtgatggttctatgggactctgggaggtgacagatgatgttttgaccaaaagtgatgcgagacacaatgtgtcacgggtccctgtgtatgcacacatcactcacaaggccttaaaggacatccccaaagaagacacaaaccctgacaactgcaaggttcgggctctggccttcaacaacaagaacaaggaactgggagcagtgtctctggatggctactttcatctctggaaggctgaaaatacactatctaagctcctctccaccaaactgccatattgccgtgagaatgtgtgtctggcttatggtagtgaatggtcagtttatgcagtgggctcccaagctcatgtctccttcttggatccacggcagccatcatacaacgtcaagtctgtctgttccagggagcgaggcagtggaatccggtcagtgagtttctacgagcacatcatcactgtgggaacagggcagggctccctgctgttctatgacatccgagctcagagatttctggaagagaggctctcagcttgttatgggtccaagcccagactagcaggggagaatctgaaactaaccactggcaaaggctggctgaatcatgatgaaacctggaggaattacttttcagacattgacttcttccccaatgctgtttacacccactgctacgactcgtctggaacgaaactctttgtggcaggaggtcccctcccttcagggctccatggaaactatgctgggctctggagttaatgacaactccccaaatgcagagatttacactaacttccattctcagtttccttgtttcttttgattttttttttcctaattgtgtgaggctcttgtgttttagtgggaacaccaaagtttgcctatagtttaggcacttaataggaagaagctctgtacagaaatctgaaagttgttttgctttttgttttcccctttggtaatcaaaattttactatcttttattatttctggcttttcaaccaaacattgttgctaatccctatttttctttaagtgacacacattctcctgtctctggcttcttcaggctgaaatgacatagctcacccttacttcactcttgagaggtagggctcctttataattacatggttgctctcagactttctgtgaaagtttgggagctgtgtgtgtctgtgtgtgtgtgagagagagatcttgtctgcgtgtgtgtgtgtgatcttgtgtgcctgtaggtactgtgtgtcactgaaattacctggagtgaggattacttgtaattaaaatatttataaaagaaacaactttattcacagagtccagctttgggactagtctgtatcttgttttttaagtctaacaacactgataataggaagtaaaaacagaaaggaaaagaaattaccactgggaaaatctttttagttagattgtaggcttcctggggcctcccatgccaggactgcaaagtgatccagccctacctgtcttcccacctgtgtgtcccccgtgtgggaagttggtgtcacttccccttcccaccctcacatctgcttagccagtagccacacccctaaaacatcagactcaccatccaggtgcagctccagaggctacaaaaggcttcatgggacttgaatccccatcctagcttctctctccttcccctcaagacctgatctggttttaaggggcctggagctgggagtctcaagtctgctaagattcacatccatagcccccatggctttgaggagaatcctctctgccattcttccaatctccccagtgggttttgctattattttctaaattgggttaagtctaagaaggtgggggtgagcagggggtttatctgtgtgtagtgagtgcttcatgtgtggaatattcattttcttactgcagtgggacttggggttgaagccacccctcctactctgttggcttagccctgagatggtgacaggctggcctgcagtcagcatcattgtgcatgtgacagcatcaatgtgattagtaatttgtctgttcctcccttgaactgtctgtttagtctgaggtttttaaacttgcaggcagctgactgtgatgtccacttgttccctgatttttacacatcatgtcaaagataacagctgttcccacccaccagttcctctaagcacatactctgcttttctgtcaacatcccattttggggaaaggaaaagtcatatttattcctgcaccccagttttttaacttgttctcccagttgtccccctcttctctgggtgtaagaagggaaattggaaaaaaaattatatatatattctccttttaatggtggggggctactggagaggagagacagcaagtccaccctaacttgttacacagcacataccacaggttctggaattctcatcttcgaacctagagaaataggtgctataaacagggaattaagcaaaatgctggatgctatagatcttttaattgtcttaattttttttctattattaaactacaggctgtagatttcttagttctcacagaacttctatcattttaaactgacttgtatatttaaaaaaaaaatcttcagtaggatgttttgtactattgctagaccctcttctgtaatgggtaatgcgtttgattgtttgagattttctgtttttaaaaatgtagcacttgactttttgccaaggaaaaaaataaaaattattccagtgcaca

SEQ ID NO: 843 - protein, 449 aa, Homo sapiens
MARKVVSRKRKAPDGAGSDAQGPQFGWDHSLHKRKRLPPVKRSLVYYLKNREVRLQNETSYSRVLHGYAAQQLPSLLKEREFHLGTLNKVFASQWLNHRQVVCGTKCNTLFVVDVQTSQITKIPILKDREPGGVTQQGCGIHAIELNPSRTLLATGGDNPNSLAIYRLPTLDPVCVGDDGHKDWIFSIAWISDTMAVSGSRDGSMGLWEVTDDVLTKSDARHNVSRVPVYAHITHKALKDIPKEDTNPDNCKVRAFNNKNKELGAVSLDGYFHLWKAENTLSKLLSTKLPYCRENVCLAYGSEWSVYAVGSQAHVSFLDPRQPSYNVKSVCSRERGSGIRSVSFYEHIITVGTGQGSLLFYDIRAQRFLEERLSACYGSKPRLAGENLKLTTGKGWLNHDETWRNYFSDIDFFPNAVYTHCYDSSGTKLFVAGGPLPSGLHGNYAGLWS

SEQ ID NO: 844 - DNA, 90141 bp, Mus musculus
  misc_feature (1)...(90141): n = A,T,C or G
tgaagtcacctaaaagtccctgaaacaatatgtaaaaattagtttagggaaagcttcagtttgctgccttatcaagcagtaaatggtggtctataatttcatttcaagtgtatcagccattttattgcaaatatctggttttaagactttcaatttaaaagtccttacttaaagcttagtttcactgaagaacaagtagaggggttggtgaggtgtctcagtggttagtgcacttgcttgctgccatgcctcatgacctaagtgagtgtggtcctcagagctacctggtagaaggagaactaactcccacaagttgtcctctgagctccatgcacttgcatgtgtgcacacacgctaagtaatccaatgtggtttaagagggaagagcaggtagagtttagctgtcgaggctagcgagtcttgaggaggaagagaaattgcagtagctgagctcctgattctcctgggactgactgagaagctacagcggctacggtgtaccaagaagctcttgtgtagttaaaatccagagcaggggggtcctccccgagcttgcaagcaggaaagcaggcgaagttaagatttaagctgcggtgggctgaatgtgtttccttagtattgctggctgaagctctaatcgccactgtgatagcccgggaatttggcatacaagggtggtggggaagcttttgtgataagattagtgtctttgtgtgaagagacaagaaaacccttgccagaacttgatcattctgattccttggtcccagacctcctagtttctgtgtctatttgtgccatctactcaaaaagtaatttgggccaggcgtggtggcgaacgcctttaatcccagcactcgggaggcagaggcaggtggatttctgagttcgaggccagcctggtctacaaagtgagctccaggacagccagggctatacagagaaaccctgtctcgaaaaaaaccaaaaaaaaaaaaaaaaaaagtactttgggagagcagcccaaactgacaaagacaaagtaggcagaggataagagggatccccaagaaaggggaggacaatgtaaggagaaagatagacagcaggaatgttggatggccccacctgcagttgacaagctaccatgtctgccacagatttccacagagacagtcacttaaaacaatacaaatgtattgtctcaccgttctggtggccagagatctcaactaaagccaggtgttggcagggggtgtttcttctggaggcttcatgtaggaagatccgtttcgtggtttctcccagttgttcagagctgccagccttccttaatctgtcattccaatggtagtctgagctctgcctggatggtttggcctggtacatccttttgtgtagttttatctccctcccttcctttggtaggcatgctcaggattatatttagcccctctctaccataacctacaaatgatctcttcatctcaagagccttagcttagctacaattgcaaagggctttttggaggttggggatttagctcagtggtagagcgcttgcctagcaagcgcaaggccctgggttcggtcctcagctctggaaaaaaaaaaaagacaaaatagcaaagggcttttgacgtagcaggccacactctttccttgttagaggtattagggtccagatcctaagaccgaaaataaagagcaaggtggagagtagagagatgaggtagggggagctagcacctggtcacaaagaccttggaagctgtagtaaagtgcacagatgcccttacatggaataaagaggcttggaaagaggtcaggtggggtcctaagagatgatactaagccaggcagtggtggtgcacgcctttaatcccagtacttaggaggcagaggcaggtggatttctgagtttgaggccagcgagttccaggacttccagggctatacagagaaaccctgtctcagaaaaacaaaaacaaaaaacaaacaaaaaaaagagatgatactgactgcagtgtgatggatcataatgcatgaatgaaggtaggttgagaggcctgccagaggctgaagcgacactgtcatagtactgggtgtacaagtgtgtaatgtgtagggtagaaagcatcaggggcttacctcatctgtaaatgagcagttctgtttagctgggtgagaagacgcctgtcgtctcagcactaaggaagctgaagctggaggatcctgagtttgagattagcagagccattacaagacattatgtagacaagcaagcaagcaaacaaacaaacaaacaagatagtttagcaataaaacagatcagtgtgttcatttgaaatacacccaccatcttctgctttctgtcttattcagagccacagtggaaggctggatatttatgccactgggtggcttcaacctttgtgtgttttagggcacacagccaaggaagggatggatggtccagcattcgaaattctgatccctaacggttcaaatgtcaactatttcagagaaaatgtcagtcattcctctgaaactagggagccaccaggtaaggacatttatggttattctgtttctgaacagataattctgacatctagtccattattttattctttctttttttttttttcctttggttttttgagacaaggtttctttgtataatagccctggctgtcctttcttgctttgtaaaccaggctggacttgaactcacagagaaacacctgcctctgactcctgcgtactgggacagtccataagtctatctatctatctatctatctatctatctatctatctatctatctatctatctatctatttatctatctatctatctatctatctatctatctatctatctatctatctatacattttatcacagacttcagccttcaatgcttcccatcacccactttctcccaatggaagtgaaagtataacaaagtaaaaacagaattctaggcctttaggcccaggcttgggaatgtggcctttgtaaaggtatgctaatcataaaagagattcctccacccacccgcttcctgggttcaaagagtgctcattcaaagaaagtcaccctgaccattaccagaacctgcaatgcaaatgtgctattgtaaggggctcttagaagctgtcttgagagttaacaattaccaggtattccttgtgactcttgtaactttgcacttccttgtgactcttaactggtatctttggtatcttccaacaacgccctccccacttccttgagttgtggtttcttcctttaaatacccccttacccagctactcggggcgccacggtcctctacccctgcgtggtgtatgaccatgggcctgagagcgctcttgaataaaaatcctcttgcagtttgcaacaagactgtttcttgtgggtgattttggggtgtcgcctctcctgagtcagaacatgggggagtcctcacgttgtgggtctttcagaaggagaggaaagctacatcatttatccttccccctgagattaaaaaaacaaaaacaaaatagggctggagagatgactcagcagttaagagcacggactgcagtggctcctccagtctccttcagcctgctttcttacagcagcactctctcttccaagtcctctgccctggttcctgattccaggttcctgccctgacttccctccggattggactgtcatatgaattaaaccctttcctcctcaagttgcttctggtcatgtgtttatcacagcaatagagaactacagtagaacaatgaggaagaacctggtggtcgattagtaatgcctgctgtgggcagtatgtgccaagtatttaacactgatttacagtaattgttcttaaagacattgtggcaactattctaatatcaactctttgaatttatattgtaaggtaatcgataaattgggtcatttcatggaaattgggggctatgaaaggtgacagaaccactttttttgctgtacaaccttggataggttgacttaattgctgaacgtgtttcgtgtttcctgatttgtttaaccgagatggaaagctcacaagacagggcttgtggggttggaaattgtgtgtgtgtgtgtgtgtgtgtgtgtgtgtgtgtgtgtgagannnnnnnnnnnnnnnnnnnncatgttccgaaatgcttcgttacttgctcacaatcatgcagatatcaagcggtggctccagaaactgaatacatgtgtgatcacgtgagtctctcctgcactgagtacatgtaaggtgtgaacacacaacatgctaacaaaagcacgctctgagaatgttctctccaggtgagtgagtgacactgtcgactcttctccttcccataagtcccagtgacaaatcagtgacaaatcagtgacaaatcagtgacaaatcagtgttctagtccaccaaagttccctcaggcaaccaatatgttcattaggcttacttacacagcatgggtgaggggttaccagcaggaacatgagtgactttaaaacagaggtgctgggagggaggtctaaacccaaaatgaacaatggctgggccgatgaagcctcactcagttaacctccctcagcccgtatactagctctattgggagaccataagcattttgtgcagaattgcatacaaatatctgggaggctagatattcagtggcccttccatctttctgtgaaggaatgccatcaggctatataagcctgcctaggacggtctgcacgcaggcagagctggtcttacgaagatggtggttgctctgctcggaggatagtcctgtgcaacacaagtacttagcacactcgtggaagggtttgtagaaacacttggaaaactctatgacaggcacattgttgggtaaagactctcgctgctactgttacatcttgaaggttgtatttatacagggcgagtgagtgggccacagattgttcaagaaacaactttaggcagggagtcattttgagggccagtatcaggatctcaccatgcccccccccccaagtactacaacagatacaaggctgagaaagtaccttgattcatacaactgggatgtcaggagcagcgtgctctcagggtcagcttattggcctgagcctgttctaatcccactgtaaccagggtacccaggaggctgggcttccccaaggaagttgtacttagtcacgtgatgacaccaaagagaatcttaaaagcatggcctactagaagacacgcactagaacacaacatgtcccatgagatttgagtggacttgggtccctttttcaaatttagttcttaggttgttgtcaacccccaaagcagcactcatttcaaaaggaataagacataattttttctggagcaaaatatgagttattatagcctaggaccatgcactcaggttgccctaaaggacacacttcagcataaaagtggttacaagagattttattaaagaacaaaggtcactgggcagtggcggcacacacctttaatcccagcactcaggaggcagaggcaggtggatctctgtgagttcgaggccagcccagtgtacagtgcagttgtctttgctgctttgtggtcgcccccccgcaccctctaaccataccccctaaccacaccctcatttcagcccatcactagataggagagaaaggatagaagggaaaagagagagatagagatccctgaatctaatttcttcttgttttttctttgcttgtagctggtctttgctactttgtgggttcttctctttcccatcttttatcccccagtttcacacttatcaccagataggagagaaagaaaggtagtggagcgagagagagagacatagagatctataaatctaattaggctttttatttctttgagcatgactactaacaaaccataatcaatgccccctccccctgatgaccaacaactacctgccctacctcctagggcactagcatttatataccctctgaaaatttcccagaattccaaaggtcacacaattatagaaaccatctgcagctggcaaagccaagcctctgctagagcacaaggcaaatcatagtcagctgctggaaaatatccctatatcccccactcctgagatgaaaacaaaaacatattcttatagtatatctgttttttttttttcaaagaaaaaaccagcaaaattccagaattgtcaccagagtgagttacagaacagccagagctacccagaaaaagtctgtcttggggggcaaagacataaatgtaggcattaaccaaaaaacattagtagggtacaagtaggtaagctatatcaaggaagggaaaactctattaagtatttagatattctctgatgacattcttagcttttggatggataagacctagtgggttgctaaaactatattttaaaggttttaccttatggttagaggatgttaggttagacacaggggtgggcaatgagtggccattaaggggactataaaaacagccaagataatttggctctgaatctgcagtgttaactctccacaattatgaagttgtagtcaagttttcagccgtgcagcatcttccacacaggtgtggcctttatctctcgccttgtctcccagctctgcaacgcaagagtcctacagctcagtcctttgactctcctggcaaccagatgtgtgtttgaaagtctcaggatcatgcaggaagcacagaccggccgttgggaaatgaaagcacacattcattctcttgcttggtacgttttgagctcttactccggatcatgaatatccttggctgtgccaagtcatagacacccagaactggagcagacccagtccctgctccgtaggagctctgtaggaagaaagatacatcaaccagcaactttgacagcagcatgctgagtcctacgggaggtgaaaaccaaccaacccagagtattacaggaggccatacaaatacttctcagtttataacacctcagtttctcttctattagagttcttttcttcactgcaaattctacccgatgcctgtcagttctctttggccgttagaacccttttgaaaggtgcagcaagttcccttttcattgagacttgggaacagagtatagtaggatgacagaatctcttccatttgctgagctggggccccaacacaattcaggcaacactcacaggccttgtaccctttggtaaagagtttgctatgtgacttattgtttacaggaacttaggttttgtagttgagagatttgccggcttgagggatcatttggatgcactttgagccctttttgttaggagacaggaagccagaccggaagtagccacccacggaggaggctttgctgttgggtacaagtgactggcttgagtgacaaaaggcacagattctctaagctcttcctgcactctgctttggctttacagggattagaagtttgaaggatggaatgtcagaagcactgcccatcttatgctgggccctggactctgagctttgagcccccgggtagcatgggtgttcggtgctgactcacagctctgagcacgtgtcaagcacctcccattcccaaaaggttttagctatgaaggtgacgccttgttatataaagagcagctcaagtcaatgaatatgtgcactgacagcaaatctgactataatttgcgatggtgatatcagggggtctgaacaaagcagttacatagctcagtaaaatgtttatacaactgacacaaacatttgctgactgagacttcaaagaccccagacctatgagnnnnnnnnnnnnnnnnnnnntgttggaggcggaaccctcagccttgcacatgctaagcagcctctgagctccacccacaccatgcacatgctaagcagctcactatcactgagctccacctctgctacatccactccagtagtgacaagcgcgacaggccccgaaaacctgggcactgtcccaaggcgaaaagttcacagaaactcagtctcctggaatcatggcattctgtataaagaatgctccaatgtccttgctttagttggtaaacggatctgtgtgctttcccttaatattgctttattacaagtgctcctaaggattgatattttgacatatagctaagttagattctaggcagtccttgatccaaccctgggattggcccccactccacccccacccccgccttactgaatccttttatatccaggacatagttagcaatgtttttcatatggaaactaccatatttatattagaacagaaagagaagacacactgaaagtaatatgaaagtttactgagaacaggaaatagctatctcttatggtggactcctcccacactgcgtactccataaagatgtaaaggccagctctctctttttcccttcctccctctctccacttatatctcttccttctgtctctttcccaaataaaaatcctcttcactgtattttataggaagcaggcttggatcccaacactttttccttagggcggaagaacccccgcactgctcagggctagttctttttccacaagcaccctgtagtaagaactcagatttccatcgtcccttgccagagagagcattgcagtggggagctttgctgacctgaccccccaggtactaaaagcaaagagtggctgtttaacattctgctataggtattctgaggtatttagattgctcccatactgaggctcctaaatctgtatgaggcacaaaaggttaatagtcacagcacattatggttctctaaggaactttacatgtgagtataagaaaagttccctagaaattcagccatgattacagagtctgtaacatttcagctgctgctgtaacccaggtgtcatccattaggaatctaggaagtgaggaaggcaaggcttgccttgtgtgaatagtattctacccagctggaggaagaggtggagctcagaggtaaattagcagggatgggaggaaatagggcatttctccgcggccctcagagagagagtgtggaagggcttacacgcttaggaagacatgtgtgaagctcggtatatatacaccgttttaatatcgttttcctgaagtcagtcttcatgtttgtatctacccgtgttgaattaaatgggacaatcacacagtttaccactgatctacacccatagcctttcaatagatactatcaaagggctcctaacaggatcccctgttcagttcagttagcatagacagaaaaactacagaataagcgtccacagtgttaacctgcttcacctacttggaagctgtacgaggccaggtacttaatttctctgcgccccttgttttctacaaaacaagactagtagcatctctgtaggggtgttctaaagataaaatgagttggtaggagccaagcacctagaccaggcaatagctacttaaaaccctgtcatatacataagagaacactttaaaacgtgtttaagagtgtgtattattcttccaaaggacctgaggtctattcccagcatccaaataaggctgttcacaacctcctgtaactctgtctgtggggattagacacttctggcttctttggtcacccacacatgttacatacacacgattaaaaataagtatttattaaataaatcagttaaactaagtctgtgcatcagtgtttttagacatacagcttgtgttttccatctctgagtctcttttgagatcctgtctccggaaaagttgacatcaattaaagtatccgcccccgctcccaaccccattttcttggaccctctcaaaacttgttacctggtccctgtgggaccattgggcccaagggcggaggcatttgcgttcagcctcttgggagttgtagtttccttaggttctggcgcatgctccaccgcaggctgggaactacaaaacccacaaatcctcgctgcaccgccctcctccgcctcgcgttcctcgcccgctcgcagccccgcccctcggtccaggcagaggcgcgatggccgaccgcggcggccctgctgaggcgcccagcccgcggggctctccccggccagagtcccgggccccgcgcacggtcgggccgggcgagaccccgcgtaccgcggcgctggcgctgcgcttcgataagcccatcaagcaggctttctacaacacgggcgccgtgctgttcgtgtgcctgtgctgcggcgccgcggtgctcgtgtacttcatcctcgaggccttcctgcggccgctgctctgggccgtgctgtgcggcactttcctgcacccgttcaagagctcgctcacgcgcctgggccgcctgtggctgcggcgcctgcaccgcgcgcacacgcccatcgtgctggccgcgctgctgctgccgctctgcttcgccgactacggcgtggaggcgctgggcgagcaggcgctgcgccgccgccgcctgttgctgctgctgggagcgggcggcccgctgctctatgggctctactgcctgggcagctacctgggcgtgcaggtgctgctggcgcacgcgggcgcgctcatctgccgcggcctcgactacttcagcagcctgtgggtgagtgagatgggggagtgcgtgcgaggttggcgggacccgggacgccgcgacaaggcggccaaaggtcctccagtgagcgccttcccacggccgagggacttggcgcgcttccttccagagaggcgggtgtgatttgaaacccgccctccgctagggaaaaggtcctttggctgagttcagttctttcaccctagtttgtgtgtgactctgggcgctttcgagaactgtattacttatgtgggggccattgcgacccggtctacgttagcaatggactgcgttaaaggagagagataccaggtgtcaatcgaggaacttcagaattggaaggaatcgcaaagataatcttagaggcgaattcctgactcagactacgtcgcaggctggttagttcacatatttatcgggcaaggttaaagtgaagtggttatttaatgcttaagaatcttaagaatgttggttggtaaactaccacaggggctaagaatgcaacgctggaatagcgagatcctagacagcgcgagatctagcgtgtatacaccccatactatttcacctttattcactttgttactgaaaaagtgaatatgccctgagattattaacgttacaaagtaattgcctttctttgctagagcaggtttaaacttgccaaaggtagattgctaattggtcccaggatcatgaggtcatctcttggttcttgtttaaagttgattgaagacattgtcaggtacttttcttcggggtgtataggagtacttttgcgggggtggtggtgctgggggtgtcatgtgtgctactgagttgtaccttcagcctcataaattagcatatcctaatggaacagacatacacagaggtaagtgtacacttctcacagttgtgggccacaggttcagttagtgtgaccgccttaaagatgaatagcttactgtcaaatctgtggctgtcaaatctgtttgtgctggggaccaaacccaagtgttagtgggcttgtgctgtagatactgagctgtagctccgctcctgttgtttactcttaagttaaatacaggggcccggaggttttccacttgctgctcttccagatgtcttgaattctgcccctagcccccatgttgcatcactgataagtctcctctacttccaacttcaagggccccagcaccctcttctgatttctccaagcacctgcatacacatgaatgtttcttacctatccttaaataaaaataataaaaataaatctttaaaaatagtttttaaaaaaggaagctaaaagcaactcaagttcacgcaaactcatacatctaataaattgttgaaattccaaaaaaaagtcagaaaaaaaaaaggaagctaaaatcagtgtccttttgttgttgaagaagtcagtttacgtggattaaattcctcgaataaaagaccattatgtgtgtataagaaaagtcctcaagaaattcagccatgattacagattctgtaacatttcagctgtcatccattcaggtgtcatccattgaatctaggaagtgaagaaggcaaggcttgccttgtgtgaatagtatcctttccagccagagtaagaggtggagctcagaggtaaattagtagggatgggaggaaatagggcatttctcctcggccctcagggagagagtggaagggcttacacacttaggaaaatacctgtgaagctcagtctatatacctgtttagtatcattttcctgaagtcagtcttcatgtttgtatctacccgtgttgaattaaatgtgacaatcacacagtttaccattgatctacaccatagcctttcaataaatactactaaaaggctcctaatacagtagtttggtcacagtgatgggagaaagggagatgaggagggagttataaagcacaacaagcccattataagagaccgttatgagtgaattagagcatgaggactaagctgagctgggtgcctgcaggttgagcttacctggcgacagacaactgtcagagttgagttctgccagtgccgataggggtcggacgtggatgaagtgaggcgtgttagcctgcacctgacactggttgaagctacatgtaaccgggcaggggcgtaccgtaagttttctatctccgaggccgcagcgtttggttttgtgagcccaagctgggctgcctaatgcaaagcatcggccctaatgctttatgacaacttgtgaatgtgagccagcatgacagaggcagagaggaaagtaccctgtaagcagacccacgttcacggggcagatgagtcatatgttcaaagatccagcttttgcatgtgtcctctgtgctaggcactgaactagcttctgacagggctacagctgcactgtggtatctatcagtcctgtccagcaggaggaagagacgtcagatctgaaaaactagagagcagtcaggtcatattctgaacctgttgctggcaggcaaagatctgctggcagtcagaactcctggtgcccttcaggaagggcaaagaacctttctccaagcacatgtgtttaaatcttcaacttaggaggaaaaacaaaactgatttcagttaaaaggaaaagtccagtgaacacaaaaattggactaatcccagctgttgccctggactcttagtagctcatgctgtctctgattctcctgccgtctgtgcaggtttccaggtcctggcgtttctgcttgcttttggtgcctctgttcactttggtttgttagcagtctgtcctcatgtcttcttcctgtacgcctcacttaagctcttttctttaccctggttccctcccaacactgcgccctggttccaggtgaaacgctaatccttcatggtaccagcagttctttttccacagtttcgggtgtgttggaatattgtcttcacctagtgatttcagaatcactaagaaaaatgtcttctgatgtcccatgctcggatttcccgggtaactttccctgtgatgtacaattgtgcaagataagtgtgaaaagttactagtgtcccctgcttcagcccttttctctgccaggaatattttgatcccctctttccttttgtttagacttgttcaggggaaaaagaccatttctagtttttgcagcagcaggtttgttttctccgtggccctgcctcctgtctctttctttatgaagaagtagtgttggaaacattgagggctgaaggatcagaggaccttccttgacttagaaacttcgctgtggcagtaacttgctttgtgacctgtgaccaaggcctcactctgggcccctcagctcccttgctgtgcaaattgaagggctggcttgaatgatgtctaagtccccttgagcttagttcagggccacaagagcctcttaggaagtgcaccctggccagccagcctctcagggagggctacacccttccacttggaaaccttgagaggtttgttgctgcttacctgacagcagctgagaggaagttctttcacaactagagacttagctataaaaactcctgactctgaaggaccagatgaccaagagaacagttttcagaatagctgtcttaaaggagaatgaagtacttggagtagttgctgctctagcagtgattggagagggcttgtttcttctgtctgagagagacttaggaagtggggcccgggagatggctcagccggtaaagtgcttgagagtctgagtttgaatccttagaatccaatagaagccgtggagtggtgatggagactggtggatcctggtggcttgctttccagccagtccaggcaaaatggtgagctccaggttgagagacttgcctcagaaaaggagaagggggaaaaagaaagaaaggaagaaaaaagatggagacatgagtaaggaagacatctcaaagtcagtctttgtctcacttgagtaggtgtgcctgcatgcacacatgcactttaacacactgagcacctcactgtgccatttcactgagaagtatgtcatgtgtgattgtgtctcctgaaaggaaaatatgagtgccttacttggagagctaactgaatgctgccaagttttatgccatcttatgtaatgtctagcacacgggtgctaaaagatggttggattatgtattttggagagagcacagcatgtttaagagaggataaatgttaggaagccttcaggtcagctgtggttcagagatttaaattcccacacaagcaggtgtgctcatgaggctgaatgtctgggctagggaggaaaaccctgttcttggtcatggtggctctgtaaacctagtgcttgggagaccaggacagaggattgtgaccttgaggacagttcacagtgaggtcctgtatccagacaaagcaacactcttaagggttggaaagccagctcggtgagagggtctctgctgagtttaatccccttcccttccaaacaaagcagagacatgcatgacacgtgatcacaaagcaagtataagtacttctcattgttttagaaaagcttaccatacttgttatgtaaagaacagtttaagcagcatagaaatttatatggtaaaagtaattatatatgtgtgtgtatatatatacatatacatatacatatatatataatatatatattatatatatatattatatatattatatatatacatatatataatatatatatattatatatatatatatatatatatatatatatatgataaccactatactacagaaagttttccctatcatacatatcctgtgtcacaataatgtatattaaaacatggagtcccatatacactgctctcatcaggcagttcctggcctcctgtagaccctttgctgttatggcttgcagctacagtttttctttttcatcttgttatggaatgaattcttttgtccaaaatgtcttttagaaaatgtttatgacaaatctttgtgtattccaacaaattcagagataaacacttttaactattggtaattaaattacccaaaaagccaagtgtttgtaaatggctctgtcttttgaacaaacagtagtatttctgtgagtctctctgaagaactacatgtaaatggttgtaaaactttgtaaggcccaaggaaggacatcttaaagggaaccccatttctttcctacttgggaaggagcatcccacagtgtgtaagcatgtggcacccctgagctccagctgcctgcagatggtgactttcattgtttttattgttgagtatatttttaccattatactttatatgcataaatttacactgtgctcctgaatatagtcgccacactcctccggttctgaatacatttgcatttttgaagctgtattgtaaacggcaactgaatactctgtatttatctgcacaccgtagtgttcatgtagcacagtcctgaaggtggaattagggggctatggaggagctgattgctttaacctgaaggaaggttatctgtgagcttcatgtttactggataaaaataacagttttcttcagatcaaaatttctcttaaaaaatctgaggtatataatttatttcttagcaacacaggtttccttgtgagtagagataacagcttctcagaatttgtctggatacacataaggaggtagatagaaacttactctgtttttagacagctattagttgctggaaacatttatactcattgtagtgaaatatgctaattcataatttccactatgtctgcatcagaactccagaaaactaagctactcgcctcttcccaggtgcttgtctcccccactctcctggctcttttgttagtcaacttgacaagctcgagttatctgggaagataagggaaccaagaaagtgcctctatccgactgcctgtagacaaagtctgtagacattttctttatatgatgtgagagggcccatcctactgtggctgttgccacccttagacaggtggtcctagggtatataagaaagcaaactgagcaagccagtaagtagccttccttcgaggcttcagttcctgtctccaggttcctgacttgagctcctgcctggactcctttccatgatagactccgatgtggaattgaaagcaaaacaaaccctttctccccccgctgcctgtagtcactgtgttctatcgcagcagtgatggccacctttcggcgtccagcgtctgagaacagctatcacaggctgctgctgctctctacttcttcataagctagagtccgcccacctcgtcatggctgtatcatgggacagtgttcctttgcttttttagcctgaattttattgcttacagtttgttggtgtctagttgcatttttataaacagacattctacattgactgctggagttaggtgctctctccagtccctgtttgtacattcgggttttggacctgaaggcacagctttgcccatcttggcattaaatgtaacaatcttccttgaatcagcacagcgtcctggccgtgggttggttaccttaggtctgtaggtgggcagcttgcctctgatcattctgtctcagttttgtgtaacctgtgggctttgctagtactttgccagagttttgtaaatttttttcacttaggactcctatttacctaagaaaatttcgtatgaccttagttatgtagctatataagacaggtttataatcaaacatttactgttaataaatcataactgtatttaattttattttttactttatatgtatgaatgttttgcctgtatgtatgtctgcgtaccacatgtgtgcagtgtttgtagagatagaagagggtgttagatcccctagaactggagttacagataattttgagcccctatgtgggtgctgggattagaacccagatcctctggaagagcagccagtgctcttaaccactgagccatatcttcagattaaagcagatttgtgtgctaatgagataagtgtgcttgggtgagtgtttaatcctgtaggcacagcatcttcagtattcttcagagttcattgctagtttgatttttataatcagtgctgagagtgttgctttgcttaagtaggtacatagtgcagaatggcaaggctatttttagtgccatttcaaaaactgctggaaattttctcataggctcgagtcgaaaagcacctgaggattttgtacttttttttttaagaaattggtcagtgccaggcagtggtggcggatgcctttaatcccagctcttgagagtcagaggcaggcagatttctgagttcaagaccagtatggtctacagagtaagttccaggtcagccagggctacacagagaaaccctgccccggaaacaaaccaaactaaacaaacaaacaacaaaaaaagaaattggtcagcacttcaaatagtttcaaaaatcaacaattctaagagtgcatgcagatagaatagttggtaccccacatgctgtggaatgctgaggaaattcctaaaatgttcttcttccatagcaggaagaggctttgtgtaagagctgtgagtgcaaagggggccctttaggtcagaaccaaggctttagtgaaatcacgtgactccactgcaggaagcacctccgacttctacgtatatgattttggattacattttcattgttgcatgttcagaacctatactactgacagacaattttcatgaccttcacattcctttatacctatgtcacagcccataggtttagaagctgggttctagtctggctgttgagtgaccaacaggatctgtgtggcatagggagaagtccagcccttccctcagggtcactattttaccactttgtaattactgaaatcgattgtatcttcattatgaaaaggactctatttcagactctacctttttttttccccctagcaccacttgtttctcctttactagggctgcagtgatggctcagtagttaagagcactggttgcacctgcagaggactggggtttgatcaccagcacccacgtggtaggtcacaactgtcacaaccttgacacggggtgctccagtgtcctcttctggcttctgagggaaccaggcacgcacttggtacacggacatatgtggaggctaaatatacccatacacacaaatacaaattgttatttgttagtgttctcgtgaagaaagagttatgtggatgtaggggccttggcagcttgtgatgatcgtttatctgtagtgataatcgttagtgataatccttcagctgtagggttgggaaatggaggaggaaccatggctggttctcttttcaacttttgctgtttcttcttgtaatatttttttcagataccctttttaactggtgcatatgactgtaggttagggtctcaacatctgtcacttagattatcaactggcttatactttagctagctcttctttgttttcaaaataactactttcctacttacattttataggctaaagtatgggctctttttagcctttttcttttttagggtccctaccttcatattagtcaacagaaacttctaggaattctacaagatcaactgtaatttaaatatggtacttacatataacttttatttttaaaaaaactagttaaatgggggaattagaacagttcccaaaccaaaaattgtatgagtgtttctggtaaaaataaagatctattttttttttaaaaaagttaaatggattttgaacttttgtatgtcttaaaacaatgtactttattaagtatataagtatcactgcctgggtttcaaatgcctatttaaacataactaaatgaaaaaggaagacccaggcaggccacccatagcatcctgtctgtgccgtgtccggaatacttacactatacagatgctgcagatattgtgtaacatatgctctttgttgtatatatgttacaactctgtcttatttatttaagatctggacattggtagttggctacgtgctgatggtttcattcaagtggaatgcaagcactcaacggtatttgagagcagtttcgattcctgtgtggatgatactgctttttcatataggtgagtcctttcttcttcttcaaaacagccgcccagtaactgtagtttaagaggctgatcagtggatgtgggtctttgtatgttgcactagagatgctttaacatattctgtagaaactgttgcgatttgagctttcgctaatcttcatccaagatactctgctttcagatgttgatctttaagttccctatgcattctttactaagttcttgacagtaagtgtgcagtgggtaaccttctagctcactttgcttgtggcaagcttggggaggagatggaaaagcacccaaggatgatgagaggcttgggccttgttgagtttgggtctgggtaagaaggaggtcttggggtaggaatgggggaggaggttagacaagaagagtgtatgaaatacaaaaacctcttcctaagaggtgttcatcctgtgaaagagtggcttaagcacttgtgtgtcacgagggagagatgccagagcttcagggagcagcgggaagaccgttgatggcttagcagagacggtgcacgccaaggctgctcagtcatgagtttcctgctcggtggggcagctcactgttagctggggccagagtgctgctgctgcatgctcttgaatggcttttcagcatgactcacatgactgggcaagacttgtaagactgagttgatagaactactaagttctactttaaaaagaaaatagttgagcaacttagagcagcagataacctaaagttgtttttagagtcgtttttataaattgtgttccccctctccccaaaggaagcagcagccaagcccagctgtctgtaaatgtcttgctcagggtctggctttgagaggtactgtctgcaggtttatggagttggaacgatgaggtttatctgcaaggtctcctgatgatgtatgtcagtcactcaggttatatttgcagaaggcagaagaggactcagggaaggcgggtgcttggggacttagctgtgtactgtgggagttctggatacagttttggggcctgttgggtcctttttgaaactcgagttctaacctagtgatatttcagagaaacaggctggttccctgacttcagggtttgtgtctacgactttgtttgtcgtggtgtcaggtgctgcataggggtgaacttgagtttggggtaatgtgaaacctgtgggtatgtgggggtgcatatgatggcctggagattgacctcttaagggtaggttggcacatgccttcatcctttgagagcaagggtgaaattgttctttcgttagagtctacctgtatgagggccttttaacaatgtttttccctgtgaaataatctcttaattttcctgtatatcaaattgttctattaactgaaaacatgacttcttactacttttcagcatcactggctggctcatggagaattccagtattcctggttattgttttcctgatgtctgtgggcaccctttatgaaaaacagaatgagaaggagtcggctggtaagacagtcttttatgagtgcgttcttagtgttttggaaggatagctgtctgtactgctgtgataaataccatgacaaaagtggcttggggggggggggggaagggtttatttcctcttctaactctcaagtcaaaggtcacactcattgcagcgaggtcagctcaggactgaagctgatccagaggccataaaggactagcttgttcttcatgacttgctcagcctgctttcctacagctcctatggcatctgcctagtgatggcaccctccacaaggatctgggccaccctacaccaataatcaatcaatcactctggtgagggaatgctctcaattgcggttctgtcttttcagatgattctactttatagaatttatcgagtaccttaccaaacaaagcacaataacttaaatgtcaaagagaaatcttttaatgtattaaaaacccgaagtggtttctaaacagaaaattaaattatctaaaatgttttaggcatctttagaccatgttcctattttgtatctttttgttattatggttaatataaaattggccatcaactattacacagtggcatttgtatttctcagtactgtgtacccgccacctccatctagttttacagtgtttatcactctgaaaggaaaacctgtacacctttcagtattgtactgtttttaatggctgagtaatattccagcacacagctcttccacattctgtctgtcatcctttcacagatgtaggttgtcttcatcttttgggtcttgtgaatagtgctggtatgaagcatttatgtacaggaagctgtttattcatttaaaatttcagtttcctgttgtggcctgtcttcctgtcaaggtgcttgaaccccagagcctgtgtggaagacttagagtggtacaggggctggtagcttccattagttctgcttgggtttaccttgttcctttccctaagtgtcagggactcaaacannnnnnnnnnnnnnnnnnnnnnnnnnnnnnnnnnnnnnnnnnnnnnnnnnnnnnnnnnnnnnnnnnnnnnnnnnnnnnnnnnnnnnnnnnnnnnnnnnnnnnnnnnnnnnnnnnnnnnnnnnnnnnnnnnnnnnnnnnnnnnnnnnnnnnnnnnnnnnnnnnnnnnnnnnnnnnnnnnnnnnnnnnnnnnnnnnnnnnnnnnnnnnnnnnnnnnnnnnnnnnnnnnnnnnnnnnnnnnnnnnnnnnnnnnnnnnnnnnnnnnnnnnnnnnnnnnnnnnnnnnnnnnnnnnnnnnnnnnnnnnnnnnnnnnnnnnnnnnnnnnnnnnnnnnnnnnnnnnnnnnnnnnnnnnnnnnnnnnnnnnnnnnnnnnnnnnnnnnnnnnnnnnnnnnnnnnnnnnnnnnnnnnnnnnnnnnnnnnnnnnnnnnnnnnnnnnnnnnnnnnnnnnnnnnnnnnnnnnnnnnnnnnnnnnnnnnnnnnnnnnnnnnnnnnnnnnnnnnnnnnnnnnnnnnnnnnnnnnnnnnnnnnnnnnnnnnnnnnnnnnnnnnnnnnnnnnnnnnnnnnnnnnnnnnnnnnnnnnnnnnnnnnnnnnnnnnnnnnnnnnnnnnnnncagctgctttgttatagggtaagtctgggtagccttatctttttattgaattcttgtctgtggattcaaccatctgaaaatggaaagtattttgggaacatgacagctatattgagcatgtaaagaccttttcttgtcatttttgcatatacagtgcagcattacaactatcacgtggcattttaatgttagatattctacataatctagggaagatttaaaatgtatgtgaggatgtgcttaggccaagtgcagacactgtctttttttaagggacttgatgtatacaagaggtcagcacctggtccctgtgatactgagggcttcctgtatataagtagcacagatctacacccaagggcttcaggcccctccctgcccaggtatacattctagtcgcccagttaacagcccttcaagagctctgagaagaataatttaggaccaggttttgagtcatgggtgggggttaaagagatgctgaggtctactattgccaggcatcaacccagacaagggtgttgatatgccagcctgttttctgaagcctgggttattgactttcaaggaaagatgtcctagagtctgagaataagtgcagagaacagcctggaagcaacgattttcctgttttgttttgttctttcctgcttcaaagctggttactgttgaccttaggacaacagtgcttttctagaggcctaaatatttcttcctcatgttcctaacatcttacttctctttaaatcagatgagaaaccatctagtctttaagagagcagacctccctcgtgttccttttcttcctgcagttgatgctttcatgtggtacaggaatgcttcagtgagctgcctcagcaggaccggttctgagccttgcctgctcttgaacttgtgtggcgtcacctgagtgaatggcctgctttgcatcatctgggctgtcttagctctgtgagccacaactagctttcgtttgtagaagtaaggtgctggatttcattagaattcaaagtctaagtttgtttgattcctggactcaacagttcactctaaatttaggggcttgacccttggaccttgggaactcttgggtggtatttcctggaactttaattcacttaggggaaaaatgtgttcaaggttctcctattgaataagaactttttgggatactttaaaattttatttttattattatgtgtataggtatgcctacacacacacacactcactgtgcatgcagtgcccaaggaggccagaagaggcatcagatcctcaaaactgtagttagagatggagctgcaattcgggtgctgtgaattgaacccaggtcttctggaagagcagccagtgctcttagtcaccgagccatggctttagctttatgaggtactttcaaatggactgtctttagaaatccaccatcaacaacagcaaacaagcaaaacacaaaccaaaacaaatgaaatggaattgatggtacctccatctgctgatgaaggtgtttcatttctggggttctgaggcacctccagtcacatgggtggagctatgatttaagccaaggtccgtgaccttcattcagccccttgttcttttcctttccttgccacattgagtgatcaggaattatccatagtgaaagtatcaacactgctgtcttggctcggctcagttgtagctgtcattacctttcttactctgttagcccagttggctcatcacttctctgtccactggatgctgtccactaggtagagacctctgtcctagtttatcttctgtgctagactcctccttgtcgtttgcacaggctggctgatgcagtgaggtgccaacagtgttctgaagggttggtgtgtgaatcagggtgtccacatctggtggcccaccttctcattgcagcctcacgtggcacccttaatattattacagtgcaccatgagctttggatggggcaaacattcaaacaccacccctggaaaaaagtgacagtgcgttcccttggcctatagagaaaataccagcattactttcaccaatgatgaaccttggtgatgttaacatgccatcctatttttttaaattaatttgtttattttatactccatattttattcacccacccaccccctgtctccatgtggatgtccccaccctcaatgccacttgacctctacactccctggggcctccagtctcttgagggttaggtgcatcatctctgaacacagacagggcagtcctctgctgtatgtgttggtggcctcatagcagctggtgtatgctgcgtggttggtgatccagtgtctgagagatcttgggggtccatcctatttttttaagcaatccagtgagactcatttttttgtgtatgttggatatttggattcagagatttgttctgagtatgagatgagtcttttcaaaagtgagaagtggctcattggttatgagcacacactgttctttcagaggaccagagttcagttcccaacacccatgtcaggtggctcacagttgcctataactccatggttggttccatggaacccaacgtttatcttctggtctccgggaatctgcacacagttgttggtttgcataccagagcacagccagcaggctgatccgggaaggaaggcagaacataatctgaggacccctagtcaggccagaacaaaagctccgaggggtgctggcctggctggaacagccagaatgttagaactgtccttggggaagctagggtagagcaggctgctggagaccttttctgatgcagtcgcaaccctggagttagtggctcgcagtggtatgcaggagctggctggtagaagctgaagttgctgagtgtcaggatgtggctgtgattaatcgtgaatggggttagatagctgcggtgttgaaagcttgatcggggcctgctgggtggggctgaggtctagcagaaaaagcttgagagaaaactcttccctagagtgttacagctctattaaataggtgctcgcagatgattcttggtgaaataactggagcactttattccttgtagagaagggaccttatagacattttggggtggggtgggatctaggggtaaatgcttctcattggctcagtctgagatgttagggatgctctgtttacatgggaaaagactttagtggggtgttgtggtcacgtggtctgagacatggagaccctggccaggagttggttctaagacctacctttctcaattatgaaaattcccagggattttgaacctgcttcaaccttgcgggatcttctgtctgggggcacggcccactgcccacacagataccctctctctaccccacaactaaaatggaaagaacaaaaaaggggctagagggatggctcagcacttcagagctttggctactgagttctatttccagcaccaaccatctgttgcagatcagaactgtgggcactgcaggcacgtggaacaaagacatacatccagctgtaacaccaacaaatagaaaataaagtgaagggaaaataataaaatctttttttttaaatcaggaaaaccaggcttctgatgtgtctctaatccaagatggttagcctggagcagtagtgtggcccacctggtagctgttcagctagttagtaaccgttagaagtatctttgctagccagaaggtaggcgcatgcttttaatcccagcacttggaaggcagaggtaggcagatctctttgagtttaaggccagcctggtctacagagtgagttccaggacagatatgcttatatttgtttgtttttttgagactatatctcaatgtgtagtcctggctagcctggaactcttagagacctaggaatactagaattaaagtcatgcaatcagggctatatagtgagaccctgtctcaaaacaacaacaacaaaacccccccaaaaaaaaaccacacaagaaagaacttggcgggggtgggggggggcaggaaaaaagaaagaaagaaacccacttttgcaggaagctctggggagagcacatgctatgaaagaacaagctggtccagtgaagcccacgtagaaagaagaggaacaaagccaagtgtccatctcctgctctgcagttactacagctacccttagagcctagagcaactgcgtttatatccaggccctgtgcactagaagctgttgagaggaaggtgtgaagggaagcagccttcattgctcactgtgggctagcaagcattcctgtgtacagtacaggtgtcagtagcaggtattttcggtttctcgtcattactctgggaacacagcagatgaagaagtagcttcctatttatactcatatcagcatgtgctttcccatcaacactggggaattaatctgctaatggtagacttatattaactccaactttgtgtcttgtctgtggccttctttggacttagacagtgcccccatactgaccctgaccctgaccctgtgcagactgctacctgaaaccttgggtgttctccacgccaccccccactcccagtccttgagctcaagatcatgtacccgtgtttatatgtctatttttagctgcattgtaaatctagtaccatgaccttacctagaatctcattcttggctttcacatgtccagaccttggggtttttgaagtgcagaaacataacatgtagatagagcttattaaaatgtgtatccgcttggtaagtcaccagggcttgggtccataaagttcaagtaccttttgttaatgttctctgcgtgctgctcctttgactcttttgaagtgtgaggctctaatcactcacagtcacagaatgcctagttgtcactgaatatgtactacatattttactgacactagaaaagtgaatagtctttatgctgtaattttgatgatttaacttgctggttttaattttcagacctttaagtgtgcagaatgttgcgtaaccctgagagaagatacaaacgtgcctgctagggagagagtgacttagggcataactgtactactagctgaaggatgggagctacagagaaatactgtagacactagtggcttatgcttacagttcgtgttgtccaccacagtactttgttgttgataaccactagggagctctcggcaaaccttctgaatgtcaggaagcagtcaggccttcgatgtgtgtcttctcacccagtcacatccaaattggaaattaggtggagctcattttgcggatgaggagactgggctcatcctactgccacccacatattaagaacatactaagtagggccttcctccatgtatagaagctgtggcttcccattttgatctccattccatctcccagacacctgtgcactcctctcctaaacctgtgttcggccacattggactgcttgtaaccctttgaagaggacactgcttttctttgtgacttctttgcttcttttttctttttttgtcttggaacatgtttctactgctcctatttaagctccaattcctccttcttaccccaagatagacttgttctgtttctttatgtggctggtgtttgagttaaagaatacatgatctatgactcataaacgagaagacctttggaaactgtcccctgagctcctgttatggattaggcttctgtcctttgtgcacctcaaaccttctgcactatttggtattaattcttaacatattgattgtaactgttagttttagctttacattgaatgtgaggttaaagtcctggtcgcttatgttattcctcttagatgagtaaatttaaaattcatcatggaagttgctttttagggtgtttcaagtgagtctccttcttataattaaattgcctatgcagaagtctgttggttcagggccactgactgctgcttactgcagaggagagagtacttactgcctgccctattttatttacattttgacaggaagttgtcccccacccttttactgttcaaggtatcctcactgtgattttgtttggggccttctactgggcacactcctgagaatctagtcctgtcctgtctctgctgcagatggtttgtgaaactacttctttctacaagtatcttcacgccagccccttaccattccctgtaggataatctggaggggttggcacgtttagctgtgatctgtcagtttatcatggggttctttggaatccagccactttacacacactggagatcacatccaggtttcctctctccagtccttctccagaatagcaagattgatttaagtatctcttagaactggtcacttagttcccaggcaggcggccactgtgtggattctgaaagggcagtggcgaggatgcttgtagcaaggacactgttgtatggcttatgtcctactgctggcctgactagactgctgttgctattgtgagaaactgagtagaacgcacacagggtcacttcttagcgctacacacaagtctgtatctatatattgcactatgtttccatagggagggacggagattgctccctgtttacagtgccagcgcatttctgttcctctttgggtaaagactaaagctgacagtatgatctctgcgtaatgtcatttggctttctggttatagctctgtttgtttgatcccagtgtccccctggcatctgcgctctccgtgcaccggccttcttttgctgttgtttgcatgtccgcttctctccatggccttccaactagcttccttctagcctaaggttatttttggtatttgttttattccctctcctctattacaatatcaattatattttcatttttaaagaaaactctttctttgggcctggagaaataacttagaggctaagagcaacttgctgctgaaaccatctgggactcgttccagggggtctgctctctcaggtctctgtgggcactgcacacatgtgatagacagacatattgcagcctaagcacctatagacaacaaataataaacctttaaagacagagcccttctcttattttccagttatgtcagatttcttgtcttaagagctagtgaaacacctactccatgtagggcagctgtagtttgtcacttgcggttatgggttttggttttgttttaaatccaggtatgtctcttcactacactctgggaatggggtttttgtctttatcccccaacacatatactagtaagcaatgaggacatgtcagacataaaaggtacttgttctctccctcagctgatgcttgccttttgctatagttaaaggacttgagtgtgtaggccaggagactgcggtcccagcacagacatgcagcttatgtcttctttctggactgtgagtgagattttctccccgagtgccttaaaacaagcttcttccatatggcatttactgaagcatggaataggacatgattaagctggtaactttgcattttaatggctaaattgatcaaagagccactcctgcttcttatctcaagtagatggccaatctttaatttgtttgatatatgggattaattggagctaataattctttgacttactgaagggtaatgttttattttccatgattggcagacttctcatttgtcagtctttccagaagtaagatcctgcctgtgagtggctgtggcttgattagaatggcctttggccttaagtttagaatctactgcagctggtatgagtagcaggtactgagtagcatctgggaattgtgtgtgtgtatttttacaaagctaataaacatctactgttgaccctggcatagatggaaacagtgtagtcagaagtgctcattaactacaggaatgttttggacagaaggccatggctgctgctgcttgccattaacttagaattcggccttcagaaactctagaactttgactaagttgctgcagataaaccataggactgcggagtacttgctgtgggagctgtgtggcctccaaacggcagtgtgtcattctgttacccatcttgcacatgcatacttgcttgttggaaactgcttttgcacatgacactttggggagtattgataaatgatctctaaggtgtaagaaagctagaacccgatgctgtgtgagctagtctgctcagtctgccgtagcctgtcaagagactgacccccgaagacacacctcacttgccggtagatgcttcatttgaatccagggcagatgagagtttggtattatccagcaggaaatttacagtgaaccaaataatgatgttcttttagatttcccactggtggatattctctttgttgatgtttttatactttgtagatctgtttttgtacaatatccatatatttgcatgttcatttacgtaatgttattactgtgaacaataaatgtggcctttcccatactgtattagaacctatgaacacaaaatagtataagacagttaaatcagcgagctctcagactctatgcaatgttttccagtggaaatgtgaattaaagtcatctggtaaagttaaagaaaaaaaaaagcccagcattttgaattaatttgcttgggtgcagtatctggctgcttaccgcatggggctctcacatgaagacagaatgtccggaacaagcagctgatgattttgaggtgttcttccttggtaaagacccacagtgcctgagaaatcactatcttaaccattatggtttgttctactgaaaacagttttggtttaagtaggcaggggttagttcctgtttatttgcttaaaggattttcatgctgtgtttcttctccccttctgaccctttacaggggcagaattaccaggacaagtgatctccatggcagcttctactcttgcaaacttggccatctccatcactgggtatgagtccagcactgaagaccagccctctgaccctccgacaggtgactgacatgaaagccatgacaggacacagggaggggacagagtggagaccaggcttgccgctcctccctgattctcatcctgactgctctcttacaccacagtcctcatgtattcgtcttacatttccagttgctttcctcttgggtttcctgtcccggccccttcccttgcttctgttttaaacatgcccttctgatgcttcttaccctgttttcttgcctcagtcccatttaccacccatggttctacccagctctgtgctctccttatcttggttttttattttctcttccttttctagcagccagttctacattattctgtttttgatgctttttattcccttccaaactctctatctgtaggtggatatttttcttttcctcattttctacattttttttttctcctggaatttttttctctttaagtaaaagtaccacttgaatgccttatgctgtatgtatatgtaatatataggagctatgtggagaagtaggaacacacgctttccttatacacgaaaccatgtttccagaggggagcaggacgatccctaggttatggagttagtgttctggcatctgtcattcccactgacctagaattttcagatccgacgagcagagcaaggacaaacaaaagcatgttatcatttgcttcacttttagccttgacccacgtgcacagatgcatgtaggcaaagcagccatataaataaagatgaatctcaaaaaatacttaactcgtatacaggaaaaggtagaatatttgttgtctcccagaatcctgattttcctagaccaggaccctgatggcaggtttgtttcagtgcagatcttctgtctctttaacccgatgcgatcctgctgtacttccagtgtagtatattttgtattgttgttttctcgtgtgaactaaaacaatgtgtgactttctgtctttgccttttttagagcccacagacaagggagaaccccctccagcattgtctgcttcttcttcatcctcctctcgttcctcaccctcttctccttcacctactttgggcagacagaggcccgagatgggaacatttctcaggaagaagaaaacgagtgacatctacttcgtgtctcttgtgtgggccatcattgctgtccagctttggctgaatctgtggatcgtacagctgctgccagtgcctgttgcaggttgttatttgcttaagtgtggatttaccttcacagactttttctccttttttaaacaatgggatttgcatatttgatacagttttgttgccatcttaaaatagttgtatgtttgtgtttaggtcataagaaaaacatttattttatgtgtatgggtgttggcatacatatgcgtgcccaccgaggccgaaaaagggtactaggtcctgtggaacttgagtttcagacagttaccagccacagagtgttccaggacatccagggatatatggagagaccctgtctcaaagacaaacaaaacaaaatctaatgaaggaatttttgaacttttatatcatcctattttagttaacttttctattggtgtgacaaagcaccaaggcttcttataaaagaaggcattaattagaggctcactgttcatgtccgtcctggtgggtagcatggcagcaggcaggcagtcatggagcctgagtagtagccgagaacttagatgttgatagaacagctatgaacgggcagagaagggtagagaaggtacagacacacaggcatgcacgcattcagggaatggctcttcaaacctcagagcctcctgcctagtctacttctccaacaaggccacatctccttatctttcccaaactgttccaccagttgagtagtcagatatatgagcctgtggtaatccattcttttcttgctttctggttttgttttgtttcaaggcaggacttctctgtatagctagccctggctgtcctgaaattcattatgtagatcaggctagccttgaatatatggagattccccctgcctctgcctcctgaattctgggattaaaggccaccacccagcaagcctgtgggaaccattcttacacaaaccaccatactgacacgcagcttataaagttggattaagaatattggtcccaggagttaaagaagctttattggaaagaaatcattacataggcccaccttcattaataaagtagcctgtcttcctagttggctttaacagctgattttctgctgacctctgacctctgttcagagcaccatcaggtgagcaaacaggagcacagttggaaatactgcctgctgtggtacaaagccactgggaagcagctatgatggccaaggaaatcagtaaatgttggggctcagttttccttaattaggaagagggaagctgtgaaggccattgtagtccatgatgtttgtaggctggacagtgagccctgcctgactcatcccgggattcagcttcacagaggtgatgctcagctggtggggcttccttggaagtgtggctggccagtttcttctcaagtacctgtggtccttcctgctccctctgccatgatcttggtttagtcctggctttactgtttagaatggaaggtagggaacttacattctgcctttcaaatctgtttcctttgtgtttgtatcttctttatagtctggatcatcaaaaagctcgtgatccactttggagtggtgggcttcctggagaaacgctgccgcgcatggtggcaggtgattgagtgcttcctgaaggagcggcaggaggctttggcaccttggccgattatcgggcttggaaagttcttactaaaagttgatagcaaggtatgattgggctgctccaatggggtctttgtgttccgtgacttgaacagtccatttcataacattgataatgtgcttcgtatctgattctccatgaaaatttaaggcttagaattatagagtggatttagatgaaataaaattgtggtcatttttcttataaaggagagaaggttaggtaatggggggtggtggnnnnnnnnnnnnnnnnnnnnnnnnnnnnnnnnnnnnnnnnnnnnnnnnnnnnnnnnnnnnnnnnnnnnnnnnnnnnnnnnnnnnnnnnnnnnnnnnnnnnnnnnnnnnnnnnnnnnnnnnnnnnnnnnnnnnnnnnnnnnnnnnnnnnnnnnnnnnnnnnnnnnnnnnnnnnnnnnnnnnnnnnnccccccccccccccccccccccgagaccagaagcacagctttaatgccaagaaattgctaatttctgagaacttagtggttaaaagacatggaatctaaatccacactctttcaggtcccacatctgttatttaccagccctgtaaccttggacagatggcttaacttctctgtgccttggtttcactatcaataaagtgggtataatagcacttatctcaaaatgtgattttttgagtgctagctgtctctcagtttttacagagaagtgtctgcctgacacagtaggagcagtgagtgaaaaatgtctctgtagccctagtggcaggaaagggacgctttggggagatgtaagcagagtcccgagcacaagcagttaggtggacctgcctgtgcagggctctgcactggagaggatccatctggactgcggatttcgagttccaagttccggtacagctacggtacagcatgtagtggggcagtcgctccgccatcctgatcctatagcagcattctgtgaaagctctgtaactcgctgtctcctgctgagctcctcctgctctcagtgactctgctattggtgcattcattctctaatgatatcccactcttcttatcttctctcacctccctgtcttccagctctggcactggctaaataagaaggtaataaacgtgtgggtgtgattgtcactgccccaacccatcactatctcctttctcattctgtgtttccgtgcatacattaaactaagatttgttttcaaaactttaagctatggaaggtcgcgaaatatgaatgctgtcctagtcatttactgaaacccccaccaagctcctagggtatgaatgggtcccttgtcaggtatttaagaggttatatcttgtagcccttctgtccagaaaatgggttttcttgtttttctctagtgtggcaactctggtctctctctctctcattctttgagtcagggtcttggtgtgtagtccagctgccttctatcctcctgcctcagtctcttgagtgccaggtttacaggcatctactaccaactttcggttcctttgtgtgtgaaacacgttaagctatagagagaggaaagaaagtctttattcctagtttttctataagtgacacaagaagttttaaaaattgacaaacctgtaaaacacttgttgaatttatcttatttcttggttagtaatttttttggtctttttttttttttttttaattgtcttagcttggacttctgttgctgtggtaacacaacttggggaggaaagggtttctttcatcttacatgtctcagtaacagtccatcctgaagagaatcaaggtaggaactgaagcagacatcatggaggaaaatactgcttaccggtttgctccttctagcctgctcagcctgcctctttatataactcaggaccacctgaaggatggcaccacccagagtgggttggacctacgtcagtcaccagtcatgaaaatgctccacaaggttgcctacaaaccagtctttttttgttttgttttgttttttgtttttttcgagacagggtttctctgtatagccctggctatcctggaactcactctgtagaccaggctggcctcgaactcagaaatccgcctgcctctgcctcccgagtgctgggattaaaggcgtgcgccaccaccgtccagcttacaaaccagtcttgtagggacattttctcaactgaggttccctcttctcaaatgactctagtttgtgtcaacgtgacagaaattaactaggactcctgtatcccagaaacagttatttatttagttttcatggcctgcaaatttgtgtttcatgagtcatgaatgaagtttgtctgtaggaactttttcttgattggcattggattgtaaaaagcagatttcatataaattcttaaggccaagctatatgtatgaagaatgctgtgcctttgacatttagtcaaagtagagcagcgtttggctctcagatccttaggacaggtgtgccagaggtggcattgtatgtgtcctgtttaaacacaagcatgactcgggtgtgataaaaattgtgtaataaaccttaaagatgtggatgtaggccacagtcacatatttctattttcagtttttatttacttatttgtatttgctaatttagtcattatttttgtggtgctgaaggtcaaattcaggccatgagcatggcagactgtcatacactgctagatccagatatgacatttaaatatggagataagaatttactcctccctccctggtgaaatggagacatgggagatgacatcacttaagattttaaactggattgcaagcaagcaatgtgtaaaatatatggtctactcccacatgtatgtggttgtatatgccctgattcctcataaactactgtcaggacatgagtgtatttattagtctgtcatcaatttatgtatgtatgtatgtctctatcatctatatctgtctacctacttacctatttacctatctatatgtagatatctagatagagtgtgtgtgtgtgtgtgtgtgtgtgtgtgtgtgtgtgtaggtgtgtgtagagagggaggaggagagacattgtataacatacatttttttaactttaatcaaagtaaagtggttctgtttccccagttggtgtgtattgaaatgaattgtcctcaagataaagaagaattaaattcattaagtttaatatatctacctcagtgggctaaatgaattaggaaacctaatttatgagcctaatgtatagctgaaaagcagaggtagtgttaaaagattcctacgagatcaagtcactgtagtgtgttcaaagcattgatgtgtagttggggtgcagctgcctgcatttctgtttgtgttctagagaagtgcataaggaattatgatacttaatagcttgatatgcaaagccagttggcttagaagttttagagtagggcttagtgtaattaagttttaaaaatatatcctcttttcatatttgaaatatttaacacatcattttaaaacagtttccttttaagaacaaaaccttaaaggttattaattggtcaaggcctgaaaagactgaagaaattcctagagaccgtagagaccgtgtgtgttccacagcccagcagtgtggttagagttttgttgcctttgctcactatgagcatgggcaaggaagatctgcctccttggaaagaaagcatctggcactccagggagtctcagctttctctgtccatgtctctcttttgctcacctcctctgtccatgtctctctccttcactcacctcctctgtccacgtctctcttttgctcacctcctctgtccatgtctctctccttcactcacctcctctgtccacgtctctcttttgctcacctcctctgtccatgtctctctccttcactcacctcctctgtccatgtctctctccttcattcacctcctctgtccacatctttcttttgctcacctcctctgtccacgtctctctctttcactcacctcctctgtccatgtctctctccttcactcacctcctctgtccacgtctctctctttcactcacctcctctgtccacgtctctctctttcactcacctcctctgtccacgtctctctctttcactcacctcctctgtccacgtctctctctttcactcacctcctctgtccatgtctctctccttcactcacctcctctgtccacgtctctctctttcactcacctcctctgtccacgtctctctctttcactcacctcctctgtccacgtctctctctttcactcacctcctctgtccacgtctctcttgctctctttcattcacactcaccagttgctgctgctttttcttcattcaactttactggcctattgtttgtttaagtgtgtgtgagtgttttgccttcattactttgtatgtgtatatatgtatgtatgatgtatatgtgtgtgtgtgtgtgtgtgtgtgtgtgtgtgtgtgtgtgtgtgttatgcacatgtatgtatgatgctgccggaagagtgcattggattctctggaactagttaaagacagtggagctaccatgtggtgctgggactgtgcaggagctcaccctgcagtatgcagcaggttggaaagaactggagcctctgaagtcttaagcttaatttctgacaaaattggagttaggaagattccactctacttaaaactatgaaggcttgagtttggaactgtgctggggctctatggaatctcatggtttgtatgttaatgccacctcataggaggttagggctccatgcttttcagaagattatttttatttaaaaccatgcttttaaggatgtttcttttaatacttttgcaaactgttactcatggaaacaaatctggttgtaactctgaaataagcttagtattgatgatataatccatactcctggtttacagagctttggagaggaaggagtgaggtagccctttgctcagggagctaccccgggaaccctagggcccagctgcttcctgatgcaaaacttgtcagttcattgattttagaacttatcttcgagtaagacacctgaccttccataccttagaaccccgttgttgtttgtttttgtcttgtttaatccctgcgttgtctgatgctttggtagcatgcactggagcttaagtcttgctttgaagctcttgagtgtcaacatcctagattaactttttgtgtctgagctcactgtggcgctaagtggaggacggtggacttcatggaagaattgttgcttttagtaaatttactcactgcatagtgagcatagttttaatttaaattagaagaacttagccatatatagctcgtgcttgggttgatgggcacagtatggcacgttagcattattgatctaattaagtttaattttgaatgttaaatggtggctttgcatggcagaaagtgtagaagttatcattgttacatattctaaaaccaaaatgtgtttaagatgtaggattgttggagttgtaaaaaataagaaatgttctagtaaagacagaatatcaaataacattttaaggaaagcataaatctgattattaaggaacagctactgtgttgaggattaatatgcttcattgagttagaatcgtgtcacagatcttatggtttcaatagaatagactagaagcttctagtgggatagcaggacttttgaaagcattttattatgaagtatctaaaatctaaaagccctggggctggtagcacctgcttgcttacttactagcaggtgagggcacctttggccccgtgtagtgacttgagttcagtctgtgtaagccacatggtgcgaggagagggcccacccttcagagtgtcctctgaccccatactcacactgtgtgtacccccagatacataaacacttatacttagcttttttaaaatttaaaagcccttacaaatattaaaatttaaaaccaaaacaaataaaaaaaaacacaacgattcacctacccactgtccacctcagtagaaccacatccacttcccaaggtctgggacctgggagccggcagtctgaatttgctgttattactgccttaacattacatacatcagcaattaccatctttaggaccctaatggagtgaaaggagactgcacctggaatgtaattgctgtctgtctttgctcctgttttctgtataatttaagagatgagtgttacaaggagcatacacaagccttctgtgttggctaactgataagacagcttcatgaaatgagttcaactgatgaaggagtgtcataattttgtttggaatgtatttgccaggcctcatgaattagagattgaaatgtgaatgtagcataaggagaatccaggagtacacatggatcgtgttctggctgactttcttctcatagccatgacaataatgaactctgcacataacagcagcaattaatacttaacttcttaaggttgcttatagcttttattgctttaatcggtatgctatagtttgctttgcaatgttggatatcctgtatttgtgatatttgaatacatacgtgtgtttgttaagtgatatgttgaagataagtaaccctcctttttcattcccatgcagatgatcatctggttggagaagatgttagataaaattattagcattttcatcatattcttgctagtcataggaacccttcttttggcccttctcctgactgcaaaggtaaggtacattaaccagtattcttgttagacaaagtccttgttagagtgcatatgcagaagaagctagcagaagcaaatgggaaatagcatttggcttatcagaagtacctctgctcactaaagtatatatccattttgtacattagtaatttttctgttagtctgcctagaatgttttctttttaaatctcatttatgtacattttgttttgtcatcaagtcttaagcagagagtgcagtttaaaaaaaaaggatcctaaaaataatttccacccccagccatagacttaagaggtttctgaattagtctcatgactccttaatgtagttagtgcagtgtgcccttctttcttttctcccggggttctggtcttgatgtcttctgctggcgctgcaggcactggcctcaagctcctgggttcaggtggctctccttcgcagtcttctgagcacctccatggacaggtgcgcctgtgcaccgactgtcacggtttctgcgttagctccttccttcctgccactagtcttcctgtgcagtgtgtaagtctgctgcagtcccacggacctgcttttgtccttgttgcttgtgcttttggtgtctgttttaaaacgctatcctctgggcacggtatggccattgctgtccctacatcaggacccagaggagactctgagaaggctttgaccactggccttccctcatgaagggagggaggctcacagggcacacagggcagctcgcgtaaggtcttcatttcttacttttcagattcagctgtagggttgtttcctgtttatgtcctcaagaaacacagctgcattttctcctgcgctgagggcttttctgagggtaattttctacactttcagtgcgttcttgtccctatttatcgaactctgtttgactccacttccagattttagtgttctgttttcagaggatggtgaagcttacgtgaaatcatggctatcaaaacttctctagctcttgcaatgattcgttagtaactgttggcagtagatgataaagggcagcagttgctacggaattgaattgcgcttatgagcggtcaccactcggaagtcctgttcttcagtcaggctcgttacagtcgatttgctttctcccctgcagctgactccattagcacttctgtctgtctgtctgtctgtctcatggctgttcctgtatgttctttaggtagtggtcacacagagatgagccctctgtgagtttttaccatgtttgacctgcggtcagtacttttgcctgttggctctttcccttctttgtccctttattgttctgtttctttgcacaggacttctgtctgcctgcctcagttgtgctcacctgtcaggctctttatttgttccatgatgcattgagttttgcttccctcagcttaatttgtgggtattgaaccatttctttcttgtgtgggatttaagtggactaaacatttgagggagccctgttgggtatctggctcccccccaccccaccccagtaaaggtattgttttctggaataccaagacagcgtctacttgagcatctaataggtacctcaatgtaacatcagaaactgttctcctcacagtccttctgttccagtaagtgacagctccactctcctgtgcagtgaggagcttcagtgtcagccttgaatacacctttgccacacatttacttcctcagaaagtcctttgacaatagcaggctgaggttgtcacataacttcctctccacagaaaacaggaataaaactgtcaagttcagaccagtgccacttaaagccattgcaaaatgaccagctaggtaagtcctagagtcatgttagcttcaagttattctgcagcaaaactctgcagctttctctgaggaattgttgtttgcatgttcggtgcagtctcttgtctgctttgtctgtgtagcttgtgtggttggtgtctgttgtggaatgccatccttcagttctgttctgatatcaggctaccaggctaacagggcagctcttcagaggcacttggagctcttcttcctgagaatatggaagaagttgatggctgaggtggggatgtgacttttagtgtcaccgccatagttgcctttacagtcgcccgtgcccttgtaggtaatccctcacccacttgtctgagcaattccagttgaacttgccggaaccagttaattccagttaaacttgccagttccctaaaccatacttgagcagcagcatttgtttcttctgtctgttgccagtgtggagggtttaaatgtttgtctacatctttccagaagaagttaacggaattacagttgtaaaataatggcaaagtctagttggaggtgagcagagcctcagagatgcatgccaagcttctagtagcatgcggttggcgtgccgagagctgagagggaaaggcaggaaaagtatagcccaaagatgtcagcaaactccagagtcaacacagacacacccataccgcagcacactccagggaagctgcggacagccatcgataaagaggaacatcgataaaggaggtaactacagcactaagggaacaaaacaatcataggaaaagacaaagagatgaagttttaaagctgaaaaacaagaagcctgactgacaaccaagaattttatgtttaatggctctgttcttaaaaataaagattaaagaactggaagtatggcagtgttgtccaagacactagcttcagtttccacttgattctctttcccccttcaaaaagtaaaggcaaaataaaaccattccagataagttacagcagacagaattaattgatggcagatgtgttctgtaaggaaagctaaaataatgtagtaggccacaccagtcacccagccagagctacatagccagaccttagcttttttttttcctccagaatctataggaaagctgagtggccgctgcaggccctgtgctgacctgggctgccagtctctccattgctctggcaggcgcttggagatcccatggctacaagcagccacagcccctggaatatgctacagaccttatctttagaacaactagacacacacagataatgacttttcgttgaagagacaggattgcagatcccttggttccataggagagaatggggtagcacttgggcatatggaaaagtgcagatttttccccctgtgctattttagttttttttttttttaatttttattttatgtatatgactgttgtgtgcatgtgtattcacagtgctcctcagaggtcagagtaggtgttgggtcacctggagccagagttacagatagctctaagtctccacatgagtgctgggaactgaacctcagacttctgcaagagcaccatgtgtttttaaccagtgacccatctttcagcccctcttttagttgttttcttttcttaatactgtaactatttaaagacaacgtggtacattgtctagactctgtgatatagagatgaactattcagtgtatgttatgtgtacatagtattccacagaacacagaaagggctgggaaattgagctgttgcttcctgtaaagtcagtattagcttgaagtaaattgtggctgatatgttaaatagcacctacagcttctaagaagtgtaggtttgggagagctaaagtggtaaagaaaacattttcttgtcttggtttctcccatctttatcctgcttgttttgttagttactgggtaagtgcctcagtctctgttctattgctgtgagacacacctcagtcaaggcgactcttacaaagggaagcgtttaactgggagcttgattccagtttcagaggcttagttcattgtcattatggtgggatcatggcttggtgtcacgcagcggggcactggagcccagggctgcatcctgatccacggactgcagaaaagcctgagcctggggtgggtttgaaacttcagagcccaccaccagtgatacccttcctctgacaaggccacacctcctaatcccttcccaacagccactgcctgggaactgagtattcaaatatatgagcctatggggaaatttgaattcttattcaaactaccacaacaggcaggtttcagtttcagtacccagtggcttttctgtatgcagcaccacacagaaccatattccagcttatttgtgtgtgtgtctcactctgcatactcactgtattagcgcaaaggtttggtattgcatgtgaaggtacaagcatgggcataatctgtacttgttcatgagttttaagtgtttggatttttaaaaagtcagtttattgagcttcttgagaacagnnnnnnnnnnnnnnnnnnnnnnnnnnnnnnnnnnnnnnnnnnnnnnnnnnnnnnnnnnnnnnnnnnnnnnnnnnnnnnnnnnnnnnnnnnnnnnnnnnnnnnnnnnnnnnnnnnnnnnnnnnnnnnnnnnnnnnnnnnnnnnnnnnnnnnnnnnnnnnnnnnnnnnnnnnnnnnnnnnnnnnnnnnnnnnnnnnnnnnnnnnnnnnnnnnnnnnnnnnnnnnnnnnnnnnnnnnnnnnnnnnnnnnnnnnnnnnnnnnnnnnnnnnnnnnnnnnnnnnnnnnnnnnnnnnnnnnnnnnnnnnnnnnnnnnnnnnnnnnnnnnnnnnnnnnnnnnnnncatatatatatatatatatatatatttcagtgtataatgtttagcaacttgtaaatacctacttctaatttaataaaaagcaggatatataattatttgatcctataaaagtaatagaaaaagacatttgaattgtgttcatacttacttttttcctctttatattataggtacatcaggagagtgttcacatgattgaagtcacaagtagtctgattaacgaaactctagcaaatcacccagagtgggcaaagtaagcatccagttttggaacaggatccacacgggtgacctggcttcagcatctgtttgtatggaccagtattcactgatagcgctacattagaagagaagaatatggtttgccaaagctttgataactggaatactgtgttgaggaagtacttcagattagagacagtttctgatatggctgtgaaggtcagactgacctaacactcagagacacccactcttgcctcagatttccaagtactgagaattcagtcatgtcctcctgatgcctggctataccttgtaatttattgacatattttactactcttttctccttatgaaagaacatttttccagacatcgtaacttgtgtggctattgacagcaatcagttttcttgatatgatcatcttgtatgtacacaatccatgaagctgctaagaactgaggctgttaatagtgttttgactcatttcatgggccagcttggtagcatgtatcatatttgagcctcagaaaaataaaaacccaggtattgttgccttggcctttcagcatgattagataattgaaaccagacctactaaatttgtgaggtttgatatttggtatatgttaatgacagtttttgtgaagtgttcgtttttcttttaacccagcctgctcccagtaattaagcctggagcattatatttacttactaagctataactgaacagtactactctgttttaatcctctaagctactctagccagaatcccagagattcttgaattttatggctttctctgctcaaactgttttctcatggtgtctcctggtttctctccccatggctatttctccctctcccatctctctgtctctttgtctgccctctctctgcatatcacacaccacacacacacacacacacacacacacacacacacacacacacacccgctgtgaggaagttcagacctattctttcccctgctcagtcattggctggtcagctagctttattgactgatcagggaataatggggaacagtgagagagaagagtctcaaaatgatatgggcacacacaaattggcatttgaataatacaaggataatctttacacagggcataataacattgtacctataggtgtttaacactgattgacagtctcggggatatagaaagtatttctgggttttggaaagcattatgtagatgaaaaggcttcttggttgaggtgtaggggagacttcttactgtagaacaaatgaaacttgaaaactacagttttcagtatgtctggacctttgtgaagagactccacatgaagagatgggtggatggaagattgaaaataattagctcatccttttaattcctggattctttggttccacatttccgtagatgtatggatctcggacatctgcagggtctcttagggtacacatttatctttcagtaggtctggaactgggctcaagcattttcatttcttaatgggctcccgggaaggttgggagctggttgtccatgacccatacttgggaatcttgttggatattgagtgtctcagtgctccggaatcatgtcctctctgctgactgggcaggtgagctaggacatgtgtgaccagagaaacggacagaagaggatggaaaagaggctgtcagggagagtagagtgcagagcctctgagtcaaggtcaggatcttcaggcctggcatcagatgttctccgtgttagtgatccgtcaataattcattgttggtagctttagttcaaagccttgttagaagaagatactgaaaatggactctttccattttctctttttctcttttctgtcagttggcttcctgaggctcaggtggtccaaagagctcttaattcagcagcaaacaatgtgtaccagtatggacgggaatggataactcacaaggtaagaaatgagcctttcttgtgcctttctctgcaggattttcacaggagcaacttcttcctttgatagaagatatgcagagattctgtttttgaatacatttacatctatagataggcaagtgccataaagtggagcaaactctcagaacgtaacacgaaacagtgccagtgcactggacagtctagagaggttgactgcttgcttgctttctgagttatttgtgcattaggatagaatgatcacagaacctaactggtcaaataagaccatgtggaggaaaaagaaattgtgcgaacacacagagtcctgtatctgctgcttactgtgcctggcagtttccaggttcatttaacagcccaagttcccgttgcactgtgaggtgttttatcacttccaggtgagaaaacaggcttagcaggctcagcagatccagatggccgtgtgatgaatttgcctcacactggtgactaactttacatccttgtttctttctgatgtagctttctggctgtttctggctgtgctttagggtggtgcttgagaataaccctaggaggactggcagaccaaggaagagtgtagctctaaacagttacctgtggagtgaagatccagaggcacgagggtgctcgtgcttgagatgaacttgactaaaggggtggggccttgggaagggagagagtgagagggaagacacagttgttggacttaaagaataactttctctgtctggagttgggacgtatccctcccctaatattgcccagagcatatagttaattttcagccttaatatgactaagtagttaggattgacaagattgaaggctctgaaatgtgtacccccaaaattgtacaagcaattaagttcttttttaaaattcaaaaaaaagggggttggagaggtagcgtgagataggcacgccctgctcatgcagaggactgggttaggctcccagcccctgcacaccgatttacggccttctgtaactctagtttcagaagatttggcaccttctgtcctctgcaagcaccaaacactcatacaataaaacaaatcttcaaaaacaataaaatagccaggcagtgttggcctttaatcccagcactcgggaggcagaggcaggcggatttctgagttcgaggccagcctggtctacagagtgagtttcaggatagccagggctatacagagaaaccctgtctcgaaaaacaaacgcaaaaaagtaacaccccaagttatgaaaaagaactcactaagagttgagaggtttgtctttcaggtttattatgtctgtccaagacgcttgatcaattggcacatgatgatattggaaaaaaattgaacaagcaagagataagtatgtgtgtatagatctttgaactgtcgtgggaggaagagtcagcttctgcaaagagcttgcagctttctataaatgtgttattttgataaagccatagcattttattcagatttatttattggagaaatttttattctgacattcttgccttttaggtaagaagataaaaggaattttggtgaatactacaccttacatcttagattaaaaaataaatttcaggctacttacagaaaagaaataactatgtaacctcttgttcaagagcctaaaaaatgaggacattgggatcaaaagtcaggaaatgtttttggttctgacttagaagacagaaggggagtatatattagccatcagttgttcattagctgttatatagatcagcctgatgtggtaaatttatttcaagtgtgacgtgtgtgtgaatggtgtatgtgattgactatgtgtgctttcttgtgtgaaggggatagagggtatagatgtgtgtaggtgggtaggcggctgtatgtgtggaggtcatagaacagcctttgagtgttggcctttaaggtagtaagtttgaagaaatactgataaatgtcacaacattttaacctgaaaaataaaatgtttttcagagatagttggcttttatatttattatgaataatttgtgtctagcttatgagcaaaccacttttataagcggtttgtaccagatataactggttcaggtatttataaggccaacatcatgtgggcaaagaagtacctaaatgcatattgtcaaccagtttggagaattagcctttcatcattaaaggaatgaagaacaaataacggtttccacttaaagcctgctgaattatctttaaggctttcagttagttcatactgccttggggaaagtggtgtcctgtgcagtactccaaagcagtacttacacaactccttagagcgttgttggccagtgcacagcactccattacttgccttgacgactcttcagtttacactggggatacgaatcgtgaaccatatgtgaagatgctgactgccttaaaaattgggactgtttatatatcctcctgtgagtagtgactaagtgcagtgaatttaataaatgaacacaacaccattgaatgtaagatggtgacaaacactagagatagaaatgcttatgattaaaaaaacacagattttatatttcatctctgtgaatggataggaagttatagaaaaaaatgggaaaatggaagcagttattttaagaaaatggaactacaatccaatgcttgtcttttaaaattgtcttgagagcctggcgtggtggtgcacgcctttaatcccagcactcgggaggcagaggcaggtggatttctgagttcgagaccagcctggtctacaaagtgagttccaggacagtcagggctatacagagaaaccctgtcatgaaaaaccaaaaaataaaataaaataaaataaagttgttttgagactagggagatggttcagtttgtaaagtatttggcagtttgtcttgcaagcctgaagacctgcgtttgttccccagcacctatgtaaatgaagctcagcccacatctttaaccccaggacaggcagaagcaggtggggctctgtgagttggaggccagcctggactacaaatgagaaagatcttatctcaaaacaaatgaacaaaagaaaagccagccacaggtaatccctgtgttgcaatcccagtgctgagaaatagaggcagtaacatctttgggctgctgactggccagtctagttgaatctggtgagctcaaggttaatttaaactctatctcaaaaagtaaagtggaaaatgactgagggagacacgcggtgtccatcgttggttttgacactcatttgtgcatatgtatgcccatacacttatacatacaaaaatcaaaatctcttaagtgcccccccccccttttttggcctgtgctagggattgagcaaggtaagtgatctcctcctgagctctttgctctgagctttacaaatgtctctaataaggaaataggatgagacactacagtgagtgtaagttgtgcctgctgtgtcaggttcccagaagtctgtcctgccagccctgcctgtctcagcagactcagggagagatttgtgcttgtatgtaaggtcctaaattttacttaagagtcttaaggcaacccttaattggagtaatgcaagacttaagctctatctagacttgctttggaaaggctttccactggacaggtaaggccaactaggtcattaagtgtgtttgcatttgtcttgttctcttgtaccctgagacccaggaagagaagtgggagggaggatgagagagaagatgggagaatttactggaacatggaggcatttaaaaacaaaacaaagacccagcatgtattgatcatactaaattacttaaaaatatcaatcagattgtacctgtatttttcttctagcttcacaaaattctaggagataaggtgaacaatacggctgtgattgaaaagcaagttctagaactgtgggacagactgtatcactcttggtttgttaaggtaagttcttttagattaagtgtccatagtaactagtaatagcattgtgctttaccgggtgattgggtctataggactgtgatggtttgtatatccttggaccagggagtggcaccatctggaggtgtggccttgttggaatgggtgtgacctggttggaatgggtgtgtcactgtgggtgtgggtataagatcctcaccctagttgcctggaagtcagtcttccactagcagcctttggatgaagacgtagaactctctctcagctctgactgtgccttgcctgcctgcctggatactgccatgctcccaccttgatgataatggactgaacctctgaccctgtaagccagccccaattaaatgtcatcctttataagacttgccttggccatggtgtctgttcacagcaataaaaccgtaaccaagacaaggactttgttaactttagagtttcacttcccattccagcagtgagaacttaagcctttgttagtgtcggcttccattggtggttagtttctttggcaagccccgtaatctctgaggtatcctcttccatcatttgctcatcatgtagtatcttcctctgcagtagctgtgtacagtgcacatacagaagccacgtctgtttgctcatggtgatggggattgagcctggcatcgtgtgtgttaataagcacaaggtctgtcactgagctgttacactccaagcttctacaagccacgtaggtggtatttttctagtagctgcattaaataactaaacacaaacaagaatattaactaaaaatggatgagattaattttaataatattcatttaattcaggttttccactgtcatttcagtatatactttataaaataaattcagtatacaaccaagtctttgaactctttcaagtgtgatttgcactagcagcacagctcagatttagtgtgagccatattttaagtgatcagtagccacctgtggttagtggctattgtttggaactagtgaattctagactttgaaaacctttctgtttgaggagacagaaatagatctaaacttgagaaactttcccttccagactgttttttgtgttgcttatacttacacactctaactttagagtttatggtagaacgagcgtggcttctactctgtataaacagcggaatctgctgagccggtttttaggccatgttatatgaacagtgggtgcagagctgctggttttttcccagggttaacttgaagagaagaagaacatgccagaggagggtggccgagtttgagtttcttgcttaacaagaatgtgacatgttctacatggtgtggtctttccctgagatgagggaataataatgacttccgtggataagacttgagagttaaagctaacagtggtatgtgagctaaagtatttcattgtgtctgaggggctaagcagttagaaaggtctcattcggtttttgtgctcactctagatcttcttaacatgtagcttttcttgtcattcatcctgtttgagccccgtttttttttttgttggagggccagagacttgaagacagatgtgtacatgggaaaactgggtggtggtctctccctctcgcatgtagcagactctagagcatctgcgctcaggaagaaaggaagggcacacaaaatgttgacttgcctctgaatttcaacctcattttgtctgctcgtttccctttcaaattcagtgcttcctgcccatgtaaattttttgcagacagacaaattagatcccacaccccttcttggctcagtgttagtttcttctctttctgctcttacattattacatagtgtatataattaagaatggagaaagaggcaaaagtaggaggtcaagagaaggtagaggcgctgaaggaagtgaaggtttacatgcaccctctgggtgctgtgagttcctggttaggagagaagcagttgtgtcgccattcacagtacctggaatgcgaatgcagaaatgctgaactactagtctttaggtggaactctaacttaatatcttaaatttgcaaggattttcataggcgagtacttactgaattattttaaacaggtgtaaaacaaaagaggcatttatcctttggacgtgttaaaatgggagtttcacatgtcactggccttgttccatagaacgtgacacactctggaaggcacaaagggcacaagatgcatgtgagccgtcagaacagctggctgggagatattttggactggcaagatattgcctctttcgttcatgagaacatcgagacttttctttcggtaagatggagtggttactgttggttgacttaacccagcttttcttacctcagtgtcttcagctgccctgtttttagtaccatggaatgcataggctttgattaaaccagaaagctgtccagaagctgagtcttgaggtctggctcagaacacccgagaaacgctgactcctgaaacacgtgaacaagcctgtgggctcaggatcaccagagtgccctaagctggacattacagacagaccaggttttctggttggtaaagcccttgatatgtggaagtagggtgggcatcactagaggggcagtaaaggctgcaccagctggcctcccactgaccccgtccgccttgcatcctaccccattgttgaaccttaatcaccaccttcattccccagagccgctttgccaggtgtcttggcatgtaacttcacagagaagatttttcttgtgaatgaacatgtgactctcatcaaattaacaagtttagaggtactcacagtactaaggtctaaggaattcaggctgagtggaatgatccaggagcatagctggacgccgcccgcccgggtgagactcaggactagctgtctgctgctggacagccttctctggtggttgcctctggattgtcaaagtgatgtttatcatgctctttcttgttttgccattttagatattatcttttggcttccaaatatggaagatgaaggtaaagatgtgactttttccaagccttcggtgctctctgacactcttgggtttctcacctctccctcagcccagccacctccctgcactcccatgcttttcctctcagccgaggtgctgtcacaatctgaaatgaaatctgaaaagtgatgtctttcattttctgtgttctaattaacagcttaattaatagggactcactctgtttcccaggctgtctgtgaacttgtggcttcaaacaatcctcctgcctcagtctccaagcaccttatattacaggcacttgacagggtccccaactatttgtgttgataatctcttccctctgctttactagcccagtggttctcattttcgtgataccatgaacacactttaatgtgttaaaagtactattttctgaggctcaggaaatggcttagttgaaaaagtctttgctgtacaatcatgaggacctggattcagactctacatctgtgtaaaagtcagaggtggtggcatacacctgtaaccccagtgctgagcgggggtcgggggtgggtgggatgcagagacaggcagctcatctggccatgctgggcggccagtctgtctgatagatgcgctccaggtgcagtaagaagccttgccttaaaaaatgacgtagaacgtgaatgaggaagacccctgatgttgacctctggcctccattctcatggatacacaggcacatgtgatctacacatgaatgtccgcacacaagtacctaatttatatcatgctaaatgttttgtaaatgttttctaatttaactcccctcaagttccttagagaaccaataaaattgttcttgttttagtcacagactcagtgtattaaagcagttaacacgcactcagttttcttttctggttgaggaatggggttcttttttttttttttttttttttttttttaaagatttatttatttattatatagtacactgtagctgtcatcagacacactagaagagggcatcagatctcattatagatggtcgtgaaccaccatgtggttgctgggatttgaactctggaccttcggaagagcagtcgggtgctctaacccactgagccatctcaccagcccagaggaatggggttcttacagagcatgcattatcttctagaacacgtttcctcctcgggagagcttggatctctttgtttcacgatttgccttatttgtctcctgtcctgagttttgaggcatggtcttcctaggcctggaagcttcacagagctgcacctgcccctgcctcgagagcaaaggcgccagggtttgctgcacacggggtttgctttggtctcctctgatgttttggcaggttccccagctctccccagggtgcttcagaagacatagagctccctacactcagttctacacccttacttgctgcttgagtatagtttaccttatttagtattgatgttcagcctttctgaataattttaaagatatatttttattgtccttatgagtgttttccctgtatgcatgtatgcagtccctacagtggccagaagagggcatcaggacctttggaattgtagataacagatggttccgagcccactatgtggatgctatgaacggaatctgggtcctgtgtaagagcagccagtgctcttaactgctgagccatttctccatattccctgactagttctttattactactttagaatagagcctggtgttagattgtcaactaaactaatacaaggaggcaaattatagcttctctttattatttttgtactttaaagagcagtggcagagctgaagtggcatactgagacttccttgtgcagttcatttcctataaggctagagcaggaaaaggaaccagaaaggctcagtggagcttatagccagtctctgggctcctagtctgacaggaaggtaaccccatctttgtcggaaagagttctgttcatattttgacccctgaatccttgcagtgttctgtttttgtgcttcctgggttctgtagaatgacactcagagggaggttggatggtggtggactccggagggaagcagcgaagcaggaggatgctgaggccgcttgttcgttctaactgccctgccctctgtgaccaagttgcttagctgcttgtgagtctcctctgggcttacatttcatggccggggactctgtttgaggcatctttttggttatgttgccactattgaataaattaatgccagcccagctcatgtttgccatttttgagttgggatgcagttttacctctacaaatcggttgcgtttttgaatttcatgggctttcttcctgatcccgcctttgctaatccctcctttctaagcctgctgattaaactcaaactctactttgatgattgagtgaacattccagcactgtcctctgtgttgtctctagttgatctcttttcaagtaaaaagggttacttggttgttgttggagactcccagtctacaattgctgtattctggtaatttcttaagagttttctatttgtgtgacttagaaactatgtaaattttttgattaaaaattccagagtgactggggccccaaaagtatgcttgccaaattacaaatacaggcattgtctcttagaattggtggctttgttcattcattctttatcccacaaggtcaaacagttaatggtgcatatttttgtaggcacagtgaagcattttcaagatttttttgtaaggagtttttgtaaatgaagcctgcctgttgaattctcatataaagactaagctgaggcttgcaagacattctgaaggcatagaatgtcccttataaattgtgcatttgaggtagaaaaggaatggcaacccttgcatagactgcatgtcataatatgagcatgcgactggaccagagctactgccttagaaaggcgccaaagagaactgcaggtgtcagggttctggtgctagctgcagcaaccctttgtgactgagctcgtgtctataaagctatccacattgcttccctcacagcactgtcctgggaacattcagtagctggcagaactcgtcctcctgacccttttggttcctgtttcgttaggaggagggacccacttgggaagaacagacattataaggggttttagttgatgaaggcacaagaaatgaaacggagacctgagaagacattgacatctctctttgctcatgttttaccaacagtgtacacaaccaacttgataactgcttctcttcaatttataggtgatagtgagcttagtctgtcccaggaaaggctctgtcattgatccttgcctcttcattattttcattgtgatttcaagactttggaataatacattatatttatagttgaatcagagttagagatggaaaggatagagggtagttagctaatctaatgcgtgacctacacttacagccctccaaagtaaatagatccacagagagatcacgtattcttctgtagacatacatatattctgtttttatagttaaaattcatagaatatataaaaatcctgtgttttaaagagagcataatagaagctggccatggttgtgcatacctttaatcccagcatgtgggaggcagaggcaaataaatctctgtaagttcgaggccagccaggtctataaagggagttccagggtagccagggctgctccacagagaaactcagttttgagaaaccaaactaaccaaataaaaccagcataatagagtgaaatgtctatgatagttgcggtactattttaagtgttatttggagtggattcattataactacttagccattttctttactattgaactagatgttttgggatttttttctgcttataaagcaggcagcagtttttacgttttccactatggctagtaagacagtgccctaaaagcacactgtgtggctacggctgtcccctttatgaggatttgtgttgaccccagctgtccctctccgtcagatcctggagtctctgtggattgttatgagccggaacgtgagcctgctgttcaccacagtcaccaccctgctgaccatcctcttctacagtggcactgcccttctcaacttcgtgctgtctctggtaggtacatttagacagcacccattgtattcccttatggattacagcatttcctgggctctgtttttgcgcatgtatagcttttatacgctcataaatgtgatttttaggagatcctgtcctttgttttgcagataattttcctgaccacactgttttatctgttaagttccagtgatgagtactacaagccagtgaagtgggtgatcagcctgacaccactttctcagccaggcccttcctctaacatcatcggccagtctgtggaagaggcgatcaggtagggacaagagcatgctgttcttactagcgtcccgtggcatcccggttaccttccttgtattcatagaaacattcagtgtggaagtagtgaaggatgccagtgttttcaagacctttatcttactttaagaaggtcctaggagcagagcacatgctttgagggaaagttcccaggagtttgtcactctattctgctgctgtgatttacaaagacctgatatgtgttcacagatcggctttagtccggtttccataaccttggcatttgctcaggagaacgcctcctcctcccacattgtctttacctcctggggcccttctctgatttcaggaccctcctgttttgtctctcttgttatgttcaactgacccaacagttgtctgtgtctgtgtctgtgtgaaatgccctcagcttttctccccattcctactcaggaagcctggggaaggtctttattaatgatgaaaattgcaacaataggttatcttttgtttatctgctttttaaaaagtcttttgtaaccattgttaccctaaaaggaaaagggaacaaaacagacaaaacccctctcttcccagtagcataaaaatagcctttgagaggctggcagccatcttggtcagtcttcagtctggctgaggcagagctgtccgggaggacaggtgcattgcccaggaagatcctttaaaggccagctctgctctagctttgcactgttgcccttctcatagaagcttcaccttctgctgtgtccctactgcgctttctacagggagcagctttctgactgacatcaaggtgcttttatgcaagatacttctgcaccctccccagcgccaggatcccctccnnnnnnnnnnnnnnnnnnnnctctctctctctctgtctctctctctgtctctctctctctctctcctgactcttcctttgccacccagggctggctttgaactggatatctcctgtctctctctgtttcctgaacgctagggttactaggattacgaatgcacactaccatgctaggccttgtcacttaacattggcactgtcgtcctgttggatctgaaagctgatgggtgggtttggatggccatcttccactgtgactggcttttgcattctgcagccctgtgtgctgttcctttacaaagttgtaataaatacttaatatgtttgagttttgcatgggctcctttgaggagtcttcaggaggaaagcgtcagtgcactgtgtctaaaagttaagtaggaattttcatcctctgcccctaaaggcgttgcaggtgtggctgctgtgtcacatgtgtgtcagtaggtggcagagaggagagaggctatgtctacgctcagtgttctgacctgtgaacatctgaatgattagtagcctaacattccctgaaaaaagtgagcctgagatatccaccagtctggtgccagagggcccagacagggagctaacctgagacaactgctattcctgtaccaggcagatctggaagggctcccaggacaagcaagctggagactagaagagctctgcctgggaccagaggccccaggcatgagtgagcccaagacagaccgccacttgggtaggccggaagaggagtgagtctcagatgagatgaactccagtcttgtgccacgctggcctgggggtatagaccatgcttgagatgagccctgcctggtgccataatgcacgagcgggacctagcacttctgagaccactcctgagacgaccccagacactcggagaacccaggcgccactaagaggagcaagtgagtggttgagaaatagaagacaaagagaaataaggatgtggtcacaatgaagagaggcagaactggacaattacgggtaatgaggagcagcctcatgtgaatagccagtgatgccacctgagaccatggttgggtcctagcctgtgctgctactggaggccacatctgggacggatgttgccaccaaaagcaaggcagacatccctggtctgggctgccaactgtggccttgttgatctccgagggctatgctcggccctgtcttcacctgggcgtgtgggagagttagctctagaggtatgaatgtaggatccctgaacctagccagctgccgtactcaggaaagcagcaggtgagttgggcctgagcatgggacagctggccctaccactcatctccctgtggttgcttagatgagggaaagagtcccttctcccctgtcctggacctggggtcatagagcagaagagctggccctgtccttcaccagcagcagcactcagaagagcagcctctgcacctcacttgggcacagcagagctgaccagggtagctgaggttatgggtgtgagagcgtgagagccagccctgcctcttgcctgttggatggtggtgttgaggagggagagataccttacttcccctccctcatttttggcagacgggagagctggccctgggattctgagagtgagagaactggccatgcccctcactggatgcaacgcttggaagagcagaccctgcacctcacctgggcagcaggatagagctgggcctggtgtggggctgcagagcatgagagccggtgggctgaccaggtcagatacctctcaggcccagatccagggctttgaattggcccactccaacatctaccccatcagtgaactgctagagtgtacaaaggggcactacagatccaaagcctatctccatgacacagggcaaccacagggtatatgagaggaggcccagtgaggttccagtattgattgagtagtagaagccagaggacttgtaccagaccaacaagtcattgtaatgaacatgtgcaggcaaagaagtgtggacaaaaggatgtcctgtgggacacactgggacacactacagcttccacagcaactctgttgtaggggcagttgcaagggtggaggggagggtttgggggtgttggggggagatgagtgggattggagtgcatgatgtgaaattcacaaagaaaaaataaaaaatgaaaaaaattaagcttaaaaagaattttcagccgggtggtgatggcgcacgcctttcatcccagcacttgggaggcagaggcaggtggatttctaagttcgaggccagcctggtctacagagtgagttccaggacagccagggctacatagagaaaccctgtctcaaaaaaaaaaaaaaaaagaaagaaaaaaaagaattttcatactggaggattatgttcaagtagaaatatgattctttgtggatgaagattaatcaacaaacaattacaaagattgtagttgattctctgtaagtgctcagtgacagcagttttataaatatgtcatcagtatatggtcaaatgaaaaatcatgaagttgatttcatataatactttagttaggcatgagtgagattgagagttagttgcatggcatacagaagtgtgtgtcctaaagattgcctctaagctgtggatttcctttgtgattaccgtgtgtgactttgaaattttgaaccttattttaattttaagttcctgttattctaaacggagtgcatttgtcactgagttttcatttcatctcaggattttgaggtagtggcatgcatcctggatccccagcattggcttcccttagagcatgctgtctcctgaatgcacacgtcacacccttctccccgaggctccctctgcttgctctggtggagatattgcacattactaagttgcatgttgtcacggcctcaatgcaatttagtgtgtgtgatattttcacatgagtgcatgcacacgggtctgggtcttgcttgctgggattagagcttttccatgctggagggctgaactggtgctgagtttcatgtgaggatgaatgctttgtaaggtttgattccgagaatggccatgttctacttcttcacccagttctgaagaaaataaaaatgttttagttatttttaaaaagttagggttgcttcttaagtaaattaatgttttcattttctaatttgagtgtattgttgactgaacaaaattcttagagatttaaagatgtaagtaatacttgtttaaagtaaaatgtgcagtaacaaatataaagatctctatnnnnnnnnnnnnnnnnnnnnnnnnnnnnnnnnnnnnnnnnnnnnnnnnnnnnnnnnnnnnnnnnnnnnnnnnnnnnnnnnnnnnnnnnnnnnnnnnnnnnnnnnnnnnnnnnnnnnnnnnnnnnnnnnnnnnnnnnnnnnnnnnnnnnnnnnnnnnnnnnnnntcggttgagagatggcttctctgtgtagccctggctatcattgtccttgaactccctctgtagaaaaggctgtaagtgctgtttttaatataaacttaagtggtaaattaatacagcggctgagtttctttatcctagttagttcccaataataacacagagacaccaagaattatttttaaacttcacctcaatatctaggcagtctgtcttaatctcctcccctaagctaatctggctaccgccagccaagaatcacaataatacttgaaattatgcttctcatgtttctgttgaactctcaagaactttcttccttctctgaataccccctaccccgtgtatgtgtgttgtgtgtgtgtctttccttccccccctccccccttgactagcagaaaccccaccctattctgtcttatgcccagccattgggtgatcagcatttacttacaaggaagagaatagtttgcatatgcttggctcagggagtgcctctattaggaggtgtggtcttgctggagtaggtatggccttgttgaagggagtgcccactgtggaagtgggctttgagaccctcctagccatgtgggagacaatggtctcctgtttgcctttggaataagatgtagaactcctccagcgccttgcgtgcttggtcactgccatgcttcccaccatgatgataatggtctgaacctgtaagccagccccaattaaatatttttctttataagagttgcattggtcatggtgtctcttcacagcaatggaaaccctaagatacaaggataatctttacatattacacaaaaacatgcctatactaggctgaccttgaactcagagactcacctgtctctgtttcccgtgttgggattaaagacatgtgccgccactaccacccagcataaagttatttaaacaaaaaaaaaaaaaaaggtgtttttgagctgcttgtagtggcacatgcctataatcctagcatttgagagcctgaggcaggaggattgctgtaagttctaggccagtttgaactacgtagagagtttaaggttagtttgagctatctatcaagacaccccccacgccccaaaaaagtggaatatttgagatatcctagcattgtaatagaatttcttatgcatactttgggaaattaactggagtaataatgccttttagctgagtggttagaggttagtgtaatatacttgaatgtttgtttttattacgtttaaaggaaaatagcctttaaaaacgttgtcttatatgtagcttttcattgagtaaggtgaagcgggagaggggggagggtgaaggatctgtgatggaagggaggttaggtatccaagcgataactagaagatactgggcatgtgcttccagactgttggcctattgatactgcaataaatctgacatagggtgctttggatttccctcctacctctaaagtgtatgtttaacctgtagtttatgaagtgtgcaatagcattgcctctttaatataactatatatacacaaattaaaatattttgctaaaaatacattaatgatcagctaagttgttggaaaaaggagtctggtagactgcctacattctgggttgactcaaacttcaatttgttgaaactagaatttctgcacagtatatgaatttgaagggacagtggtatacctgtgatcaagggagctggcaccgtccctagtcagcatggtagacactgtctgttgctgctcaggggccctcttcgttgatggtgccattgttttctggggagaggatagtctggtgctcagcctatctttagagaggtctttagagaggaagggtggaagtaatgtacagaaatgtgaggtaggtggggttttggactcgactcattttctgtttcctttcttcctgagacgcgtgcttcctccttgtctggcttgtggtactttgtcccccaagcctgtctgagccgtgactgtcctgctcactctgtaacttgcttctggtttcacttcatccagagcaggttgagggattgaagttgtcttgtttcttcttcagtttagaaacatggttgtgtgagtgaggcttgaagcacacactcttttagtgccactcactacagatattcttaggattatcaggggaaagggtgcagaggaaagataaccccagctcagggtagaaagaaaggctgtgctcatcccataagtggtctgttttggggtgagctgatgtttgagtcatctttggggagcctcagttgagttactttattgtgtccttagtgccaacttacttttactatgaaaaacttgtaaatgaggtgaggctaacgaaagccacctttccacactagacaaattcctcaccctagtagttcatgtggttactcttcctccctccccagcttccctttccagtggtctctgaggaggctgcactctgattttctctaatgtagaagggattccatggcctctccttggctgatgtggcggtgtcctcaggtctccgagaacagtcaccttccccttcctttccatgcttgcccttggagggtatcctgtcccctcctctaattggactactgccccttaagcctactaagcctcgcctcttgtcttttccaggccagccattctctctctctgcttatctatgtttccctatcatttcttttccttagacttttcaattcctttgtttcctattggctatctcctctcctttctgtctttttgatgtatttaaatctgggtccatgttgagcgagtcacatgactcattcttgagtgacaccgttggtaaagttggcaaaggttttgcagatggagaagtattcattgatagcatgtgccagagtactgttgcatgaccgtcactggaccacagatctcacttgtgctctaggagcttccctcctgggaatctttgcagaaagcccgtgtgtgcttcatgtaccgtgtcactttgctgccatggtcctctttttcagtgacagcttcaccttcttgtgactgtctgcccctacatagccctggcctctgtgtttctgtggttcctggggttatttggggcctattctgcacagggctgccttgctgcctcaattcctttcaacagaaaagtgtcatacagaacaagatatagcctgtttttgctccttgtattttcctgcctgcttttactctgcagttaataaccaatcatctccccagatgacttgcattatttgataccatgataccaaaagttactttgtagttttggttgcataaagaaatgtatgaaaatcttgttaaaaggaaaaattgacagactataagttagattattcctcactcttctctggcccatccctttcccttctgtttcctttcctgcattctctcccccgttcccctcttattcctcttttcctctgtgctggggcttgaacccaggacttggcgtgtgctactaaacattgctctaccactgagctatactccgcacctcacttgttctttttacatgtagactggatgcaggctgggtttcttagaacttaattctttctttagacgtagagaatatgattcttacccaggaaatacctactttagaagtggaaagttggccttagctcagttaagtgcttgcataacacacaaggccctgagtatgattctctcccaccccagcccccactcaaagagagaaaatcggtggggaagttcaatgatacgcttctttaggatgttttgagtttttgtctcatcagagagaagtgtagtttgcagcttagatatctatgggctttagtattttaataacgtaagtagcattctcagacaaatgagacctgttgccagacttggaatacaatgactggaaacccggaggtgatgagttttctgagcatgttatgatgctaggattgtttaccttttcttttctgtctgggttttctagaggggtgttcgatgcttccctcaaaatggctggcttctatggactgtacacctggctgactcacactatatttggcatcaatattgtcttcataccatcaggtaacaaccatatacagaacttcctggctatttaaggaaagttagaccttgcgttagagctgccttcttccttagaataaggtctctggatcagcaatgtgcttgtattttgctgtagcctcagtatccggaactacacccataatctagtcatttgcaggtgttgttgaatgagtaaatgtctaatacttatataacattgggcatagttggtactcagattaattgaactaattggcaaggagtgagcagtttgtcgtctgatagctttgtcccatgagggatgccatcccaggggcaggatgagtgagtctgagcgggtttaattaagcacttgtgccttttgtgatcctcctctgagacacagcacctccctcctacaagcagcacacaggctggtgacaagcttgcagtttttccttgtcgcttcagaacctctgtctgtccactttttaatttttttgtcactgtttctctaaatatccccctccttccacactctctgctgtcagcttccattctccttccttccttatgttccacattcaagcttcctttttcccactcagctgtagtaagtagcccaccctctgactgtcactgtaccctgtaagtagcccaccctctgactgtcactgtaccctgtaagtagcccaccctctgactatcttgtaccctgtaagtagttcaccctctgattgtcttgtaccctgagaccacacaaagctattgtataatcatgttaaggcaggcaggaaaggcatgtatagatgaaagtcagtttttcaaggtcacccagatggttaacggttagaccagaacaagaatccactgctgggtggctcttagtctgaagggagcaaaaggagagagagcttggactgctttgggacaggtgaatttgaagtctttctacttacaggatttttatttgtttatatctagtatgcttaattttttagtggcaaggaaagaataagaattcaacccctctccccccccaaaacaaaaaaaccaaaaagccaggcagtggtagcacacacctttgatcccaacacttgggaggcagaggcaggcagatttctgagttcaaggccagcctggtctacagagtgagttccaggacagccagggttacacagcgaaaccctgtctcggaaaagccaaacaaagcaaaacaaaacaccccccccccaaaaaaaaattcaacccaaggggagaaccagagtgggtggacaccctcatagaagcaggggtagggaggatgggatgggagtttctggaggggagagtgggaaatgggataacatttgaaatgtaaataaataaaatatccaattagaaaaaaattcaacccaagatgaagattgacttgtgagtaggacattttggtgaatattctatacttatatttctgggactggattttattacccaaagggtaataggatttaacacttaaaatctaacataaactagggactggagagatggctcagcatataagagcaatggctgctctttgaaaggacctgggtgttcaagtcccaacactcatagcagctcacaactatctataactccagtttcagtggctctgacactcttacacatacacaacaacaatgcactaaataaataaataaataaataaatatttaaaagaaaaaaaaaagaatacaaacacataagctggacacaatagaaaagttttagtaacaacttttaagatagtgagctgttatttaactaaaaagctcaaacaggctctaccagtcctctaaaacagaagcctgtgttcacttacttatttgggtagacttttaagaagattatttttcattttatgtgtgtgggtgttgggtgcatgcttgtatgtattagcaccacatgtgagcagtacctgcagagacttgaagagtatgtcagatcctggggactggagttacacgtgactgtgagtggcatgtgggtgccaggattcaaaccagtgccctcccaccagagccatctctccagctgcagtgggtgggggtcgtgcttgggccctgctactttgtaactgttgcccgggctttgattgcttctcttttactcctctattagctttggcagcaatccttggagctgtgccatttctggggacatattgggcagcagtacctgccgttctagacctgtggctgacacaagggctaggatgtaaagccatcttgctcctggtctttcatctcttgccaacatacttcgtagacactgcaatctactctgatatatcagggtaagtgttctccagttcttgctcagtcttagggtgtttggtttggggaagggttggggatggagtagtggcaatcagttgggtagccttttgtgatcctttcacagtgaaattcaacaatgttgaattacattgttgtggtaaatttctgatcgttattatgtaagtataaaatccaaaattaagaccaaaattatgcataattctgttttgagttttgtggcatttagcctaggaaaaaaagtattactaagcatatataaaatattttaagtacaataaagagttagtggagggggctggagagatggctcagtgggagcaccgaatgctcttccgtaggtcctgagttcaaatcccagcaaccacttgatggctcacaaccatcagtagtaataggatctgatgcccacttctggtgtgtctgaagacagctccagtatacttacataaataaaataaataaataaatcttaaaaaaaaaaagattgccattggaggcccacttgaactacatagcaatatcctgtctcattgtcagacacagagcacggaactggagaaccatctctgtggttaagaatgtgttctttcaaaaaactcaagtgtggttcccaacacctccattgggcagctcacaactgtctgtaacggtagttccagggaatccaagatcctcttctggtattaagtcatacaaacacatatgcacatacacaaaaatcaaacttataaaaaacccctccgcaccagaaaaaccaccccaaaacccaaagcctgtcttagtggtgaatactgtaatcccggcacttgggcaggcataggcaggggactaacctagttcaaagccatctactttccatggcaagctgcaggccaggtagggtaccagggagaccctgcctcagaacattcagccacagaactggttctgtgatcaactgatcgtttaacaactgaggtttaaacagtatatgattcatacttagtgctctgtgtatttaaactcgctgtaaatttttttatattaagggttatagttataattcaagacttatgtgatttttctcataatactttatttgatcagttattaaaaatgaaaagtgtgatgtacacacacacacatatatatatgtatatgtgtatatatacatatatatatacacacacacacatacgtacatacgtacatacatacacacacgtatatatttggggggggctttttttttttttttgtcgagacagggtttctctgtgtagctctggctgtccaccctgggctactctgtagaccaggctggcctcgaactcagcaatttgcctgctgctgcctcccaagtgctgggattgaaggcatgcaccaccactgccccacataaatatatttttaattaagcttttatttaaaagttctccttgcaccactttaagccttaagaatttctggtacttcactgctataagtctttttggaagaagagaactaaattgtgaatattatgtttttatttcctgaaggctggttcactgctgtgtgtttgtaaactgctatgtattccaaaatcctttttgtgtatctaattatttaccttgatgaaaactttccactcatcagtgttatttaaaaactagaaacacacagaccgtgactgtttctttgtccctcttgcgtcagtggtcaggacttatctgtactgtgttgctatatctgtctccctccctcctggttgtgtcagcattgccgtcatagcctgtgcgacagcatgactcttgtaaaataaaagtcttgtgctttattgacagatgtcttccatatacaacctgttattacacctgtagtagttatattttagaaggttgccaaaggtcaaaactgaacaaaaggagtattgctgttactattttataaaactgtaattgttgttttattaaagaaactatacctgctaaattgcactcactattatccttaaaggaagtaaacctagcaggtatcttaggtaaccagtcttgaggcagcaataatcttcaggaagccgtgtgggatgggttcagactacctgatagcagcatgcttttattcttttagtggctagtcctgcaaaaagaggcagaggtcactgttggtacatatgggagaaaatctttgtttctcaatattattatatgttcttaattctacattgatgtaatctaaagaaagctagtagtggagtaatatcagagataccgcattgtgttagaaagtatttgggacttctccaaagctggtattcattggaaatcatatgttggactggtatgctttttgttccagaggaggccacccctacctgaccggcttagcagtggctggtggagcctactacctgggcctagaaggagcaatcattgggcctatccttctctgcatacttgttgttgcttccaatatctacagtgccatgctagtgagtcctacgaactcgatgcccacaccaaatcagaccccttggcctgctcagactcagcggtgagttcagcagtatcacagtgagcatgcgcagagacaggctgcgctgtgtgtgttttcaacgaatggctacatctggggcttatcagggtcaacttctccagcactcctttccatgcaggttatttccaccagtcctcaaggcttcttctctccatctgcctattgatatcctgactgcagtcacttcagaatagctttaaacatggtctaaaatgtactgccctcctgaggcaggctttgcttggtcagtgtttctgcctgaccatatcattgcttgtttcttcactcaatcttttcattgtctcagtgtaccagcctcatttttcagtgcagtattaaaaggcatcaggtagatgctattttatggctattaaaagacaagattctgtcatctggtatgcacatcatagtggttgtgaattatattttacttgcttgaatgcctagaagtggaatgttttctgtgtatcagatttaatgtcaaaaacttgcaaagtaaggtaagtgtgttgtctcatgcctaaccccagcacgtggaaggcagagcgtcgagagaatcaacagcttgggcagcagagactatcccagaatcaaacaataaaaccttacaaaatggggtttctgtgtaagtcatgcagatgtacatacagcctagaaacaagataaacagaataaataggtttaaccttctagagactgtattatgttgtccagcttgtcaccagtggggaagcactgagttctgctgtgtcattatatattcttgtgtactttgagtcactgagaagttggtctgacagtccctttacacttctatacttctgtctgtctgtctctctgtctgcctctctattatctcttgtctatctatctcatgtattatatctcaaactcagtttccccttccacacttctatccttctaggtagaattttaaagtgtagtgcagctcactttgttttaaatatcatgtcttttgaattgatcagagtagcttctgagttagtcagttgctcagaagcccattggtgctcatacctttatattttgtttgttcatatttttattgagaccggatctcagtgtgtcattgtgtagcccttgctggcttggattttggagatccaccttcctgtgcctccaaatgcaagaaccagagctctgcatcccgacacacccatttagtgatggctaagaaaagtccgttttctcaggaagactagaacagcgggatgtaggtgactgaccaaggcttcaccgccaacctgggctgttaacactaggactagatcattccctcccctcccttcttccctgtcttgaggccgtcttcctgtggagcccaggacagctgaattcacagtccactctttagcttcctgagtacggtgtgtattacttccattctgtttgcttttcctcttcatagcaggagcttggaaacctgcacagtgaaaggatagtttcttcaagctactagagagaatgacagagtttcctaatgttttattgtatgggtgtgtgtgtgtgtgtgtgtgtgtgtgtgtgtgtgtcttctaatgatttttagtatataaaccaagattcactgaaagatgaagcaagagaaaccagtatatacagacaagagaagacaagagtaggaagctgcatcatcaggtcaggatgctgggaaaggagatgtgagggctgttagatacccagcataattccatcagtcattcatgcgtgtgggcagtttttgccaagctcattgtgaaaaacagggctttgcctttacccagcagcagtgatatcagtgaagggctttggttttcagctcatgttaaaaataagacactgaagttgtaggtgggctattacatttgtggctttaatttaatctgacaagtccactaccctgtgcagcccttaatggctgtgacttttggtctcttttgtgcactgataattcctcacagaaaggtcttcagatctcttagctggaggttgcaagcccagctgcagccaggagcagggagggggcaatgagttgaagattcagagctctgctgtaggtgtagtaccctgtgctagtacacagccacactcacatctctgcctgttgttcctagtccaaaactcattcccttctccagaggaaagctaggagtcggaaagaaggaagaaggatcagctgcttggttgggtggaggttggccggggtggtcgagggggccgtggtgctttcttagcagaggagcagcaggtcactgctcagtcccaccctccactctcataggcagcacacagtctaacctgcttctgaaccttttgggtatttagctcagtgaattaattaggttgttttagtctcctcctaataatggcttggagttcttgcttttcagaggtggctaagtctgagtggttgcccgttggattcaccccaccaacccccagttgaggcattctgggcctaaaggaaatgtgcgttttatctgccactgtttaagaagtaacacaaacaacacttctaacatttgctgagacttaccatgtgctgaatcccatgataaaaacatcatgtgttatctttatctgttctggtttttttgagacacggtctccctctgtagcccgactcgcctggaactcactgaagttcacttgtttgaccctccagagtcctgggagtaaaaggcatgtaccaggcctggcttcgctggtgtgcattactgttctgaacctattagtattttccaggatgcttaggtgacatagtttagaaatattaagttgctctatgtatatatagttccaggcttgcaagctgatctgttttaattgatgctctgtctccctgaacacaccaaccctgagtgtgtgtcctaactcagtcgctgtcctgtcccttatccagtccttgaatctctccttgccctttaccctcaccacaagggtctgagctggcacttcccttggggctgctgtagtatgcgtgccacctgtctgtcaccccctactgttgtctggccactgttggctaactgctttctaagcttgtttcactttagctttctttccttgggaaagctcatccaggttttcttggccgggaggcagcactgaattcatcaggctaaccataatgttaatcttattttatacttctttgtctttcaggccgacagacattttatttataaattagagatttctttgaaatttttaatgatgtaaaaggataaattaatcttataggatgttaagaaatgtttataggttattagttgtaaaagcatttccaaggcttatcaaaattgagcactatctagattcttatttgttggagaaagcttctagccaacttgcctgtcttcaaatgcaaaaacacaagctaagacaacactcttgagaagtagttacatagatagatacttgcagtgttggttctgacagagttgcagaggaagtcttttgcccccagctcccatgcatgcatgcacccacatttggccatggctagatgccttgttagaactataggggatagaggctggggctctgccaagcacagtgctcagaaatggggacagtgtcactgttgagaaataatagacacatagatggatatatatcttcattttttttaatttaatttttttcaaaagatagcacaagtatttaaggaaccttgtgtttcattgttcaggtctgtcagcatgtgtagtcaggtgataaaaaaaactctttcaaagccttgtccctccatatctgcttttgaaagtagagccttactagtcctcttattctgagggcctggggggaaggactttgggtatatgtgagtgccatatcttttctgtaacatttgcccgggttcctcttgaccttgaaggactttgtttattataagggtaggcttccatttatttctgctttctctaatcctgtgtgtggggactgaaaatgctcaagacaaatggagtcgaagaggaggtggcaggatgttggaattgcttttcatgatagagttgccttacaagctgttaagcaaaaagcctttgtgctgtgagtgttgtttacactgctccctgggctttcccacagcagcctctgtcttagctgtttctagggaaaatgttgagggccgggcgtggtagcacacgcctttaatcccagcactcgggaggcagaggcaggcggatttctgagtttgaggccagcctggtctacacagtgagttccaggatagccagggctacacagagaaaccctgtctccaaaagaaaaaaaaaaaaaaaaagaagaagagagaatgttgagcatttaatggtaactgatgctataaaacaaaattaattttattcaacttggaagaaaatgatataagaaggaacactgatataacatgctgtgtttatatggttacagactaaatgtaaattgaacgttgctctcgaggacctggagagatggcttagtagtagttaagcctagttgttgctcttgcagaggacgctggtttaggttcatgtggtggcctacagccatctgtaaacctagttcctagggcattgggtactctttaggcaccagacactcatgcaggcaaactctcaaacacattaaataaatctcaatacttttgatttttgaaaaatgctagtgttctcaagtttgtcttttgtatttctaccagatgattatgttaaaacgtatgctttctctctaaatgggtcctaataaactgtccaaatatatattttttgcttctgatatgtttgattaaatgatagtaatgttaataataaaaaccctatatatcagctgaactcaaaacaaccagaagagaatagtttgtttttttacttgtttaaaaagaagtccaggggacattccaggtctagagtgttagtcaaatgcccgagcctagcctcttaccatcagaatgctataccaaccatgacttgtggcgttctaaggtatcagatactggagcacatgttcattggtaacctctgaccctggcgccatggctgtctgtgagcatctttactttaccaggtgacactatgacaggcctgtcagctatatcaaaggctgtttagctaccatggtcctaaggtagatgcattgtagatgcatcagacctttctatctagtccaaataccagtcggcactaggtatcacttaccttatcttatgtgagacaagtcaggtgatgggaacaccttcctttacctgtctggcactccaccctgcaggccttgggttctttgtagcaccagggtccctccttcaaaacaggactatatcagcaattagtctgatcagcaagacttactctctttaacatcgtatctgttttccagctagttagaagttccaagagccaagaaactgtccctaagttacacaacacttctgtaatatctcgttagccaaaatccagtcacatggcaaattgtgcttcaagtctggggaggtctcagataagagataatggactcagccccaaatcgggctcctgtttatacacaatgagggctaactaagagattttgaaacagtcttgtgaaaatgctaaaaatagggactataatctcttctaccctcttaaaggttatgaaagaatacagtgttgtatggtaactggttctgggcttgcccctccctcctggtagttttgctaaccccactccccactcctttccaaagcaaagccaaccattctctcttcctttttttttaggactttccgtgacatctctgaagatctgaaatcttcagtagattgacctggcttccctgcagtgacttctggggagtctcactttgacagtgagtcctgcgagcgttggcctctgctctgtcagccgtgtctggcaggcaggggtacccagaaaagaagcagaagcagaacaccaagcgagagagaacttgctctcggccgcttcgcattttaaaacacagcttgagagttgagaactgtgtctgctcacagctcatgctaagacggcttgaaagtcgcagttcatgcactggtaccaaggcttgaaattgccctctttgattatctgctgcagtgtttatttataagttattttaaggattctggatgacctactattaagtgtatacccagtgtaatgctccttctgctgtaggagtttagcccttgtcagcgagaaggttttccctgtggagtatggttcagtaagcagaaaagggtaaagatggctccctgtgctgagaggagagaggatgcaggaggagtgcagctcttcctctcagccaggttgccagatttctataactcttctgaccacactgaaaagatgccaactgagctgctatgaatagtaacgatgtgacagatccctgccgtcagccttcctctcttacctgctttacaagcacagactgaggtgcagtggtccctggctttgtcatgtgtgccctcagttagttgcttagcagcagaatttcttcttccacttagcaccgtgccttgtacttgggagtctagacgaatgcttgctgagttggactataactttgcacgtatctcagatatgacacaaccggcatagtgttttatactttacacagcctttgtgcacattactttacacacatttcacatcagctctcggagctttgtactctggggagtgtcaccctggcggcgggggttgcggggctaagcttcaggacagcagcagtgcaaagccaccaagtgttgaaacttatctcctccttctgatgttacatctgcagaatgcatttcttatggctttggcagtttcccagtcctgttagcagaggttctcatttattcgatacatgtgaaagagttgtcctgcttcatgacgcaggacatggcgtcacttgagcccagctcctagtgttgagccctttccagctgttgttccagctgttgttccagctgtcctgggcagcagaaggggttttgatttgttttttgaaagcacttaagactaaaatttttcttaaaacttcttactaactttataacttgattgattaataaaacccacacatgctgggcggtggtggcacacgcctttaatcccagcacttgggaggcagaggcaggcggatttctgagtttgaggccagtctggtctgcagagtgagttccaggacagccagggctacacagagaaaccctgtctcagaaaaccaaaataaataaataaataaataaataaataaataaaccccacacatactgcagtgccatctgacttgctatgtatagtatggctcatgctggtttcctggttgtatcatgaatccttcaacattatgacctgttaatccatcatctgttagatctgaccactaaaccacttactctgttctttaataagttggtcatttgctcattaatacttttcttgagcattagtaaattctaggcaccatgccaaggaccacagggggctgtgggcgatgactcccacgatggcttctctcaccttaaatgccagccagatcatgtaaatcatactaaatctaaaattcttgcattaaaatggttgaggagagaaaccaagtttttgtttttaaactatattgtgataagtttataattagcacatgctcataagcagcaaatatacacagtgagtttgtatacatctacaaattatgttgctccagtgtgcttttagccatgtaaaagcaaatttgcaaaaaactaagtttgagctgattcatagttgttggtaggatagttctcaatttgaatgtgaatttctaggggaactctgagctctaagtttagagcttcctaaattagtggtaatggtataagtctgtcctgaaattttaagagcagaagtcccccaaaaactcaaactaccccattgctacagtgaatccaggaaggctgccagttggaaaaacatcctagcatgtgtcaggcacagggaagaggttttacggaattttcctaggacagagagagaatagataacatgaggtggtaagagtcttttagtccctaacataacttaccttgaagagtttgcgtagaatttgacctgggaagaagagaatatatatggctggtggctggtttggttttttgggtttttttttttttgttgttgttgttgttgtgttttttggtttgtgatgtgtgtgtgtgttcatgtgcatgtataggtagactttttggctactttattgggttcttttacctgcctctcttctccaccccgatcccttgcaacccccaacactaggtcagtgaggaaaggttagagggaaagggggcatagatctctttggactacttccttgtgattagggatgtcaaatttcctagaggaaagtccagtcttcattgtcaggacttctccaaccagcagaccagcaaaccagcaacacacacgcagcagcaggaatcagcagcagcctccacccccctcagggctctcagcagaccctcggattccaaaggtaaacgaccttcagctggcagaatcgtgcccctgcccaccatgagacgagtcatagtcagctgctgtggacaatctgaagcagccccatatcccacgcctggggttaaaactaaagcataatcacaaaacataactggggtttttcatataagaaaatttaaagctaacagagcactagttagtctgtctttacagggtctttactcttcctttttgttttattagcatttctttaaaaatgcaactagatctttctacaactgcttgtcttgtaggattgtgtgatatatctgtaatatgctttatattataatattcaaagaattgcttcatctcactgaagacatgtgagagggcattatcagtattaatttgtgcaggtgtcctccaaacttctgttatttccaataaatgtgcaattacagaaccagcttttcggaactcaaagcagttgcacattgggactgaatatgaatcgtgtatggtgtgcaaactgtagtgttagaaattctgcaaaatggaacacatcatctgtctgccagatttcatttcctttagcactcctaggactactcggcaggtaatgaagtttggttatacagagaataagtaaggcatttttttatctcctcggcttgttgccaaatcatagaaaaaaaatttaaactttgattgttaacacggtgggtttttttcatgaaattttgaggcttctaatacatttcccattgataattggtcaatttcttcatttccttgtgccaatagactgctcaacctgtatgagactgaatatgagtctcatattcaaaaatacaatggaaagtgtctatttctgattgccagttgcggttgcacaaataagattaattctgagccatccggaacaaattcagcagtttctatatacagaacaactctttctgcatactgagagtcagtaattgttaagagattcagagaaatctagcactagggttgcatacagctctgacttttgaacggaatttcgtgggctttgggtcactttgcttattttgtccgacttacagccttccattctcaacttacttgcatcaggatagaatgtaggcgcctcaggaactggccttccctttacaatacttgggagaatccaattagttctttttgtaaattgaagatgcttgctttggagatatttgttaatttctcccaaatagttgctacatgctttgcaaatcttcattgattacacatagtgacataatctcagcattagtaaaaggcaccacaattttggctgtgtctgttactgataattcatatagtcttattctaccttttataattaaatcagaaaccttttctatatatgtaagtttttaactttttactttgtgtattaagaaaatctatctataattctatcttccctttgtataatgagccacgtaagagaatgagttgatggcaaaaaaatgaaaatacaatcaagcttaggctctgtgtgatccacatatgcatcttgctgtgagtaaactctttacttccactgttaaccattctatactgttttaagtctgaatttacttgtaatggttgaaataagttacttgacgagttaatctggttgtaggccatagccaattaatatttcccattaatttttgaaaagcattaagagtttgcaactgatctctacagatctgtaccttttatggttaatattttataacccaaatagttaaccaaatctactctctgtattttacaggagtgatctgtaattcccagcatggcagaattctttgtgttttttaaaaacgttttctctaaagtatctttgtcagaattagccaacagcacatcatccatgtaatgataaataatagattgagggaattgcctacaagttatttctagctgttgttgctcaaaatactgacataaagttggactatttaacattccacttgggagcatttattggaccactattatgatcagtagatgctaagaaagcaaaccctttcttatcatgctcatgcagaaggattgtgaaaacactcttttaagtcaatcaatgtcataggctatgacctaggtcatgaagaaggtaaaggaattcccggctgtaaacgtcccaggggttgaattactcagttcagcattcttaaatctgataacatcctctattttcctgatttcatttttgtttttgtttgttttatttttttttcttttttgtaacaaacacaggcgaattccatggattgttagactctcctgtatggtaagcctccacctgctcttgtactagctgctcactgcctgcaggttttccccagttaagggccactgctctacccatacaggcttgtcagccagctattttagggcagggctgttgtgattcggaaacccagtccctggaacagcccgtgattgtttttgatgacacataccagtatctttcccaggaacatctaccatctccctaaagtttcatcatgagctgtctctgggattcaggaatatctgagtaccaaccatgttgttgtaaaagatcccttccccataaatttatgggtatgtcagccacataaggtctccgcttccctgtttgcccttctggtcctaacccattgtacactttgttttatttgaggtaatataccaattcccgtaaactgtatgaacattatgaagtggccattcagagttccacgattttggggagatgatagtcacatcaactcctgtatccaccaaaccttctatttcaacactatttacctaaagtttaactttggtcattaactatccactgtttgctaaagcacacgtttttcagtactcccaaatccccctgatctttcagctggagcagctttgcccttagtgtagggaaacagtagcagtttttaaaacttttattgtcccttgcattactttgcatctctctctctctctctctctccctctccctccctccctctctctctccccctccctccctccctctctcaagccacaatttaaatttcttctttgaaattcccatctataacaaacacatcactagtaagcctcaaccctcacattcttattcatccccaagatctaaataactttaaaagtcccacagtctttgcaattcttaaaatttcaatctctttaaaatatccatctcttttaaaacccaaagtctttttacaattaaaagtctcttaactgtgggctccattaaaatagtttcttccttcaagagggaaaaatatcagggcacagtcacaatcaaaagcaaaaattaaactccagctgtccaatgtctggtatccaactcacaatcttctgggctcctacaagggcttgggtcatttctccagccatgcccgttgtagcacacatcttgtcttctaggctccaactgcctgtattccactgctgctgctgtccttggtggtcatctcatggtactggcatctgcaaacactgctgtcttctgctgtaactatgcttcaccaatagcctctcataggctctcttcatggtgccaagcctcaactcctttacatgaccccttcagtcctgggccatcaattgcagctgaggctgcaccttcactaatggccttccatggcctctcacagtgccgagtctcagctgctctgggtgaccccttcatgccttcaaaaccagtaccaccggggtgacccttacacattaccaagtccagccacagcacaaggtacaaccttggctatctctggaacctgtgtgctctctgcctctgtgctctcaaaaaatacttcccagaagatgtcacctcaatgatgctggtctcttcttaatcactgctaatttttgctggttagctccagtgaaccagcatcagtagtcccagtaatgcaaagttctttaatcttccactcttctcaacattatcttcaaagctcctacacaacattcaccagagctcttaataccgaatggatcttctggcccaaagttccacagtcctctccaaaacatggtcaggttgtcacaggaataccccattcctggtaccaatctgtcttagtcagggtttctattcctgcacaaacatcatgaccaagaagcagctggggaggaaagggtttattcagcttacatcactgaaagaagtcaggactggaactcaaacaggtcaggaagcaggagctgatgcagaggccatggagggatgttccttactggcttgcttcccctggcttgctcagcctgctctcttatagaacccaagactgccagcccagagatggtcccacccacaaggggcctttcccccttgatcactaattgagaaaatgccttgcagttggatctcatggaggcatttcctcaactgaagctcctttctctgtgataactccagctgtgtcaagttgacacaagactaggcagtacaaggtttatctgtggtcaaatctagatcaatataagatcagaaatacttagttgctggttgttgttgttgctgttgtctttgttgttgttgcctgcttgtaatctcctggatggccagagggaaacactgtggggcctcaagctggcagcctcctactcctaccccttttcatttcctgatggcaagagattaccttgtgtgtcccttttggacctgcccttatctatccaatgagagcacttggcacaacacctgtaaactccgggaagcctaggtattcttttggacaacatattgctgccagaaacagtggcagtactatatttcccacagttaacaccaggcatttcattattgtgctcagaaagtatcatatttcttacagttatcacatggacattttgaaatctgaggcttttagccacttggtcacaatttctttgtaaatggctgaattcaccacaattaaaacactgggcatttttatatccgagacctagctatagcttatactatggtattagcatgatgtttgtgagagccaatatcagttgtgtcccttatccactcatccattggcactaccgcggctctaataatctaataacactttcacattgtgcattagcattctcaaatgtcaccatctttaacaacacctgtctggaatcagggtcttatatggctttgtttacagctgaaacaaatctttgcaagaaatctgtgaaggcttccccagagcttatataatcttagtaaatgtggctctttccttgggctcctcaactttgtccccaagctcttaaagctgccaagccacattgttctataatggcatcatcagattgaatgtgtattttgtagatcagaataccacccttcactaagcacttgatctttattcagtccccattctctacttcattgttcaacattccaggcttccttcctctaccatgttaaccatagtaactgctgaccaacctccagtacagcaccaatcccttccaatcttggggaataattctattttggatagcttggttacttaatctatcttttacataaggggaatgcattacataggaaatcacagactctttaaaatgcctcagatctatcatttctatagggtgacatgttatgattgtaaccagcaccattagcaggcatgtgctttacaatcactgggaaaacctgatggagattttgtaatccaagacctctcctctacccacatggctagcatgagattaaccctttctttcccaacgggctatttcagcttttcctgcatgtctccccagcccctggctggggggacttgaaactgaaagtgggcagtactgggcatgattggccttctatcctttattcatcctgctggaagctcctgctctcagtcactgcttcttgagcccttttgttcttgcctttcaggcgcttttcaagagcttccgcacagccaattctgtaaacctttcaaaaacaagtagaaggacccatttcatccttttttgtttgtttgtttgtttgtttgtttctccagttcctctgtatctacttgcagcttttccaattgctcaggcattcttccaactttgagacagaatataggaacaacaagaagaaagagaaaattccctctgggaacaaagcaggtggtagaccgaccagtggcagcagccataataaacttcttggtttgccaggggccagccacagcaaactgcagtttctggcacttagcatctcttcctaaaaacagcgattaagtaaatagcctttgtaatatctcagcaggaactgctgggctctaactttctgcctgctaatcaaaagtctcaggaagagtaagggacacttagaaaatgattatagcacttattactgagttgtaaaatgttgctcatgaaagttgtctaaggggaaaagcagaaagatcctaactggggaaagagaaaaattcttctaagtggagaaagggaaaaattctctactcttaagtggggaaaggcaaaaaattctctctctcctcctcatctcttcgtcctcagtacttatacatctttaagaatacatggctggttgtggtggcgcacgccagtaggatttgctgaaggaggcagaagcaggaggatcgcgagttcgaggccagcctggtctacacattttaaacctgggcgtggtggcgcacgcctataattccagaactcgggaggcagaggcaggtggatttctgagtttgaggccagcctggtctacaaagtgagttctaggacagccagggctatacagagaaaccctgtctcaaaaaaaacaaaaaaaaaacaaaaaacaaaaaacaaacaaacaaaatacatgatcacatgttacaaagttcacaagttcacaaaaaagaatcaaatcataaactgaattatacgtttacaacaaagaatgtctacatccattaggagtaattttctgactaagcaaccataacctgtctcagctccacaggttcactgaaggcttaaaaccataactaagttattagtgaagttttgtatcgataaacccatttttaaagaccgctttttttcttttttcttgctttttttttaaagatttatttattactatatgtaagtacacggtagctgtcttcagacacaccagaagagagcatctgatcccattgcagatggttgtgaaccaccatgtggttgctgggatttgaactcaggaccttcagaagagcagtcatttctcttacccactgagccatctctccagccccccccagtcaatattttatcttctttcctagcacctataataaatcgttagttccctttttatgacctttggttaattattttacaacctcttggaatatgttctaagaaggaaaagtctggttaccatgtaagagcagttagctggtgacacttgggaaactggcagagttcttattgtagttttgactattagaaaaggacctaatagcagtcctgctataaaagatcttaataatgacagatataatttgaggaatttttatagggtcatcattaagacttaagacattacctgtttgtctggatagcaccaccacaaggcagtacatctttgtagatttgcagacatctgctccaaaagggtgtgctattacttagtgattgttatatatgttaataataacaacaggaaaagcatattaatagcaggaatctctcctaaaatgaatccctcacagccttgcttaagaagggcacacctgttgcagactacataataatccaaagcaggccatttcaggatgttcacctgctagttattagcttggcccattatgactcctgacattggttgatgtcctggaacagaatatccattccttcctaccctcctgactcctctacggcattagaagcccagtttcccattctgcctaactccttgtctgggcaccacttgtaagcagactttttggctactttatacatgtgcatgtgtgtgcatttgtgtgtgtgtgtgcatttgtgtgtgtgtgtatgtatgtatgtatgtatgtgtgtaaccaggacctcattgctcaggagaatgcacccatgaagcaaaagtagctcagtaaaactgagagcagaaatcctccatagcatcttggattgaacagatagattatgggttaatttaccaatttctgtccgctttaagctgcaggatttgttcatcctgctaacaaatggggagctaacaagctgtgctcacccatttactgctgtttttgctacaagaacgaggtgcaggtctggaagtgtaagttccatgttctgcacattctgcctgatctctcactcttatttttagcagttatgtgccagcctctttggctgccaggattagataataaatccgtgagagtcctgacccttcttccctgagaaccagctgctttcctttgggctctgagatgagcctgggttggaaagtggtgaccaagatgtgttctgtagaggccctgtgtccaaactgtggctttgggcatggcagctgtttgtaccagtgtacaggcagcaaagcacttgtaggaaaggtcttctagctaaccttggccttcatatagaactcaccatgctctcgggacttcagcatttctctgtttcccacttttctaggtgactgagaagtgtggcaagaagtgctgggaccttcaggccaataggtttagactagaatacatttgtttaggtggtatcctgaggttttaccctggtgtatggggaaatactttccatacgccagtcctacctaaccttccagtatcttctgagggcctcccacagcctttcccagtgggactttgcccttttcacagtgaagattgcttatggcaatatactcccaaatttttgttcctgcaaagagtaactagtatttattttctatttatttatttatttattttatcagtttctagtctttgctcattatgctatcaaatctgttaactcactaaggtctggggaaaaactaatatctgaacccatgaaacagccttctcaatagcttaagacgacttggagaattgtaggtagagtcttctcaccagtgtcacaaaagcttggtgcctggaggggctgttgtagtcaggttatgcctttgttttagacaaggaaaccaatgtgtgggtaaagtagcttacgcagcagccagttagcaaccgaattcagatggaacaggtcctctccatcagcctgccttctgctcctcctgtcttcctcacggctcagtcacttttgtcacacataaata

SEQ ID NO: 845 - DNA, 3104 bp, Mus musculus
ccaggcagaggcgcgatggccgaccgcggcggccctgctgaggcgcccagcccgcggggctctccccggccagagtcccgggccccgcgcacggtcgggccgggcgagaccccgcgtaccgcggcgctggcgctgcgcttcgataagcccatcaagcaggctttctacaacacgggcgccgtgctgttcgtgtgcctgtgctgcggcgccgcggtgctcgtgtacttcatcctcgaggccttcctgcggccgctgctctgggccgtgctgtgcggcactttcctgcacccgttcaagagctcgctcacgcgcctgggccgcctgtggctgcggcgcctgcaccgcgcgcacacgcccatcgtgctggccgcgctgctgctgccgctctgcttcgccgactacggcgtggaggcgctgggcgagcaggcgctgcgccgccgccgcctgttgctgctgctgggagcgggcggcccgctgctctatgggctctactgcctgggcagctacctgggcgtgcaggtgctgctggcgcacgcgggcgcgctcatctgccgcggcctcgactacttcagcagcctgtggatctggacattggtagttggctacgtgctgatggtttcattcaagtggaatgcaagcactcaacggtatttgagagcagtttcgattcctgtgtggatgatactgctttttcatatagcatcactggctggctcatggagaattccagtattcctggttattgttttcctgatgtctgtgggcaccctttatgaaaaacagaatgagaaggagtcggctggggcagaattaccaggacaagtgatctccatggcagcttctactcttgcaaacttggccatctccatcactgggtatgagtccagcactgaagaccagccctctgaccctccgacagtctggatcatcaaaaagctcgtgatccactttggagtggtgggcttcctggagaaacgctgccgcgcatggtggcaggtgattgagtgcttcctgaaggagcggcaggaggctttggcaccttggccgattatcgggcttggaaagttcttactaaaagttgatagcaagatgatcatctggttggagaagatgttagataaaattattagcattttcatcatattcttgctagtcataggaacccttcttttggcccttctcctgactgcaaaggtacatcaggagagtgttcacatgattgaagtcacaagtagtctgattaacgaaactctagcaaatcacccagagtgggcaaattggcttcctgaggctcaggtggtccaaagagctcttaattcagcagcaaacaatgtgtaccagtatggacgggaatggataactcacaagcttcacaaaattctaggagataaggtgaacaatacggctgtgattgaaaagcaagttctagaactgtgggacagactgtatcactcttggtttgttaagaacgtgacacactctggaaggcacaaagggcacaagatgcatgtgagccgtcagaacagctggctgggagatattttggactggcaagatattgcctctttcgttcatgagaacatcgagacttttctttcgatcctggagtctctgtggattgttatgagccggaacgtgagcctgctgttcaccacagtcaccaccctgctgaccatcctcttctacagtggcactgcccttctcaacttcgtgctgtctctgataattttcctgaccacactgttttatctgttaagttccagtgatgagtactacaagccagtgaagtgggtgatcagcctgacaccactttctcagccaggcccttcctctaacatcatcggccagtctgtggaagaggcgatcagaggggtgttcgatgcttccctcaaaatggctggcttctatggactgtacacctggctgactcacactatatttggcatcaatattgtcttcataccatcagctttggcagcaatccttggagctgtgccatttctggggacatattgggcagcagtacctgccgttctagacctgtggctgacacaagggctaggatgtaaagccatcttgctcctggtctttcatctcttgccaacatacttcgtagacactgcaatctactctgatatatcaggaggaggccacccctacctgaccggcttagcagtggctggtggagcctactacctgggcctagaaggagcaatcattgggcctatccttctctgcatacttgttgttgcttccaatatctacagtgccatgctagtgagtcctacgaactcgatgcccacaccaaatcagaccccttggcctgctcagactcagcggactttccgtgacatctctgaagatctgaaatcttcagtagattgacctggcttccctgcagtgacttctggggagtctcactttgacagtgagtcctgcgagcgttggcctctgctctgtcagccgtgtctggcaggcaggggtacccagaaaagaagcagaagcagaacaccaagcgagagagaacttgctctcggccgcttcgcattttaaaacacagagaaaccctgtctcagaaaaccaaaataaataaataaataaataaataaataaataaaccccacacatactgcagtgccatctgacttgctatgtatagtatggctcatgctggtttcctggttgtatcatgaatccttcaacattatgacctgttaatccatcatctgttagatctgaccactaaaccacttactctgttctttaataagttggtcatttgctcattaatacttttcttgagcattagtaaattctaggcaccatgccaaggaccacagggggctgtgggcgatgactcccacgatggcttctctcaccttaaatgccagccagatcatgtaaatcatactaaatctaaaattcttgcattaaaatggttgaggagagaaaccaagtttttgtttttaaactatattgtgataagtttataattagcacatgctcataagcagcaaatatacacagtgagtttgtatacatctacaaattatgttgctccagtgtgcttttagccatgtaaaagcaaatttgcaaaaaactaa

SEQ ID NO: 846 - protein, 778 aa, Mus musculus
PGRGAMADRGGPAEAPSPRGSPRPESRAPRTVGPGETPRTAALRFDKPIKQAFYNTGAVLFVCLCCGAAVLVYFIAFLRPLLWAVLCGTFLHPFKSSLTRLGRLWLRRLHRAHTPIVLAALLLPLCFADYGVEALGEQALRRRRLLLLLGAGGPLLYGCLGSYLGVQVLLAHAGALICRGLDYFSSLWIWTLVVGYVLMVSFKWNASTQRYLRAVSIPVWMILLFHIASLAGSWRIPVFLVIVFLMSVGTLYEKQNEKESAGAELPGQVISMAASTLANLAISITGYESSTEDQPSDPPTVWIIKKLVIHFGVVGFLEKRCRAWWQVIECFLKERQEAPWPIIGLGKFLLKVDSKMIIWLEKMLDKIISIFIIFLLVIGTLLLALLLTAKVHQESVHMIEVTSSLINETLANHPEWANWLPEAQVVQRALNSAANNVYQYGREWITHKLHKILGDKVNNTAVIEKQVLELWDRLYHSWFVKNVTHSGRHKGHKMHVSRQNSWLGDILDWQDIASFVHENIETFLSISLWIVMSRNVSLLFTTVTTLLTILFYSGTALLNFVLSLIIFLTTLFYLLSSSDEYYKPVKWVISLTPLSQPGPSSNIIGQSVEEAIRGVFDASLKMAGFYGTWLTHTIFGINIVFIPSAAILGAVPFLGTYWAAVPAVLDLWLTQGLGCKAILLLVFHLLPTYFVDTAIYSDISGGGHPYLTGLAVAGGAYYLGLEGAIIGPILLCILVVNIYSAMLVSPTNSMPTPNQTPWPAQTQRTFRDISEDLKSSVD

SEQ ID NO: 847 - DNA, 121160 bp, Homo sapiens
aatctggctccaggagtattaatatacttttttgagactgtctacaaaatactattttgtaaaaactatgcctttacatagacattgataggttatatttgttttataacaattgtgtacctaatgtttgtgattaattttgagatttatgtatatttataagcctatcttatgtaaatttttactctaagatgtgtggcacattactaataaagacgtggatttctatttatgtaaagtaattgtagcaatattcctagatgctacctaaatgattgttctgtccatttgccatcacaaatacttttatctttggatgattatgttagtcagaatatattaattagatttaaactttaaaataagaattacaacatagtttgaaattcttcctgttgatgtaattaaagttagtttataattccttattgctttgctctggtgcatttttcttttctgtttctggttttaaatctttcatcagtaaagtcactctcatttctccctgaatctatagaccttggagaagacgatagcctgtcttgtctgacaaagaggaaaatcattttgctgtcatcaggtaaaaattcccgtagagaaacaatctgtaaaataatcttacatttatagctttggtttaatactttattaggtagtgaatggaggcctataatcccatttcaagtgtatcagttggttaattgcacatggctagctctaagaatttcaataatcagcattattggcaactaaaccatataatattttgagaataattagagtttagttgtagagcataatgaatcaccagggaggtcgttgagctgccagtactacaggggctagcttgagaagatcaaggaatggcatgttaaaaaagaatcaggcattaccacattctgcattcaaagctctaattttcaccaaaaaaaaaaaattcaaatattttgtcctttgtttagtattctgcttgttccgtgtagtatttattttgcagtatcctgagtggacagcccagctatcaaatctgatcctggctaatgtttgacttggagatttcttagggctcagtcgcaggtacaaggatcagatgataagctataagaagagacagaggaactgcaatggacatgagagccacctgcgtccaggaggttaagaagctttaaccattcattcattcattcaatcaatcaatatttatttatttatttatttatttattatttttttagggtctttgtcacccaggccagagcgcagtggcacgatcagagcttactgtagcctcaacctcctgggctcaagcgatcctcccacctcagcctcccaaattgctgggattacaggtgtaagccactacacccagacaataaatatttatcgaagactcttatgtgctcgtccttgtgctagacattacacagagaggactctaggaagaacagttcttgatttctgcccccaccctggggctcaccctgggggcctgtttggagagtcaaacacacaccatgacagtaccttgtggtgaattcagtggtaaggaaaagctcaggtctgatgctaaacctgagtggaggtcctcacccagcctggggcaactaggaaagcaggtggtgatactgaagtgaaccttaaggaaggggtgctgtggactgaacatttgttcctcccaaattcatatgttgaaaccctaatccccaatgtggtggtatttggagatggagcctttggtaggtaattgggccgtgagggtagagccctcatgaatagcattagtgtccatataagaagagacaggagagaatttgcttcttttctccactctccaccatgtgagtacacaatgagaaactggccatctttgaaccaggaagagggccctcaccagaacccaacaatgctggcgcctgttctcaggcttcccagcctccagaaccatgagaaagaaatttttgttgctgaaaccagtccgtctgtggtaatttgtgggagaagcctaaattgattaaaacaaaggggtagaaatatgttaggcaaagggtgtacaggggcatcaccaagaaaggggagaacaacccaacagcctcagacgaaagaccagcaggatgtattctggaaccattgtcatctgacaaggcttatcttagttttctattgctcctgaaaacagtttccacaaacatagtggtttaaaactacagaaatacattttcatacagttctggaggccagaaatctgaagtgaatcttacacagctaaatttaaggtattggtggcggggcccagtggctcacacctgtaatcccaacactttgggaggccgaggttggtggatcagttgaggtcaggagttcgagaccagcctggccaacatggcaaaaccccatctctgctaaaaatacaaaaaattagctgggcgtggtggcaggcacctgtaatcccagctactcgggaggctgaggcaggagaatcgcttgaacctgggaggcagagtttgcagtgagctgagatcgtgccactacactccagtgcaggtgacagagtgagactccatctcaaaataaataaataaataaaaaataaatgtaaggtattgacagggctggttccttctggaggctccagggaatagaattcattccttgtgtcttttaggttctggtagctgaccaaattccttaggctgtggcctcatcactccagtctctgtctccctggtcagatgaccttcttttcttctgtagtctaatctccctctgataaagatacttgtgattatatttagggcccactgaaataacccaggataatttccctatctcaagatccttaattatacctgcaaggtgccttttgcaatgtagggtaatgcttcataggttccaggaattaagacttggttacctttgggggtcattattcctagcatcacaaggccagaggataaaggatgaagtgaggatggggagaggtgaggcagagtgagcagggtcctgttcacagaggaccttgcaaatcatagtaaagaactttgacaccttctcacaggggataaggaggcttagggagagactagcttgtgttttagaaggatcatgctggcttccatgttgactggagtggagcaagaggatgagcttaaagactagttagaggcagaagtgacatcagtgtggtgcagagtgtacaaatatgtagcacttagaattcaaaaccagcaggacttaatctacaaataaagatggtttctttacacataaagaaaaattagtctggcccagcgtggtggctcatgcctgtaatcctagcactttgggaggccaatgctggaggattgcttgagcccaggagttggagaccagcctgggcaacatggcaaaaccccatctctaccaaaaatacaaaaatcagccactttcataattaggtctcaaaataaataaataaatattttttgtttaaaagaaagattaggcagtttttttttcaagatagaatcttgctctgttgcccaggctggagtgcaatggcacgatctcagttcactgcaacctctgcctcctgggttcaagcaattctcctgcctcagcctcccaagtagctgggattacaggcatgtgccaccaggcccagctaattttttgtatttttagtagagacagggtttcaccatgttggctgggctggtctcaaactcctgacctcaagtgatctgcccgcctcagcctcccagtgctgggattacaggcatgagccactgcgcctggcctagtctgggcaatttgaaatgcatcaaccatctcctgtttttcagtcttgctcaggtttgcagcagaaggctggttgtttattccactggttggcctcagccttagtgtgagtatatcgtagggaatagagctaaggaagcaatgggctaagaattccaaatcctgagccctaaggcttaaacttcaactatccaggtaaagcttgagccattcctgtgaagagggggaacgaccagtgatggacactcaaggtcagccactttctagagagggaattctgactttcggtgcataattgttcgtcgcaaagtcccgcttgcaatgcccatccttcacaccaaccttcttcccaccttaggaagcgaaggaggtgtcttgttgcagacttaaaaaaaattatgtatctctacacttcattttattcatctggccctctcccaggcacgtcagtttcatcaaggttggttgaattgatttgataagcttttcactgaaacatttcactaactggtaaatcgttgacatggcacgacattgtatgggaggttagttgcagctggatggcacagaccaaaaggacaggaaaggctacccttgactcggtgaactagcaggacctgcactgtgagtaggggccacatgtccagctatgggagtgggagggatgagggggaagtaggtagggagttaggcaaggcctgttgggatcagacttgcttgcaccatttatccttcagccactgagatttttaaaaaatcttggcctgtaattccaacacttttggaggccaaggcatgcggattgctcgagctcaggaactcgagaccaacatgggcaacatggccaaaacctgtctctaccaaaaatacaaaaaaaattagccaaacgtggtggcatgtgcctgtggttccagctactagggaggttggggtgggaggactgcttgagcctgggaggcggaggttgcagtgagctgagatcgtgccactgcactccagcctgggtgacagagtgacactctgtctcaaaaaaaaaaaaaaaaaagagaaagaattcagtgatagttcagtgatagattaataatgtttgccatggacttagcaaaggaaagtagtaattcacatgccatgcaattgccagccttggtttatagtaattgtaataaaagaccttgttataactattccagtagtcactgtttgaatttctattgtaaagtaaccatcatagctgggttcagttcatggcagctaagtgctgtgtataaagcagcccaagggaaggtaagtaatgactactctgtggccaagtaccatattagttatttacataaactagttctagtcctcacaacagctctgcaatgtagatttcttatctctcttgtacaaatgaggaaacattctcagtaagttaatttatccaagggtatacagcaagaaagcagtagagccaggattataatccaaatctgtctgccttaaaagcttgtgttctttccagcacatcctgcagcctctacaataatatggtgtctactcactttttttaattattaaaaaaaagtgtgcaaagtactggagcaaatgcaaaaaagcttatcgatgacttttgatccaatggggaattcagatatttgtgaaaatgattacaatataatgtggttggtacttgagaagagatagctgtaagtgctacacagtaaaggtagctgctaagtttccctggatcaggaaaattccacaaaggagatgattttgagctgaggcttgaaagatgaatgggaattatccagataggcaagaggagagttatatatctggaaggctggtcctatgaagatagaagagatgtccaatgtatggttgttggtctaaggagctcaatgtgctcttggcagttgttgcacatctgtacgggatgccaaatgtaaatagtgcccccaaatgtgaattgtatccctggaattgcgcaaagtggtggccctggaccatggagagataccacaatgtcctgggtagagccttgctctgtcgcccaggctggagtgcagtggtgtgatctcagctcactgcaacctctatctcccaggatcaagcgattctcctgcctcagcttcctgagtacctgggattacaggcgcccactaccatgcctggctaatttttgtatttttagtagagatggggcttcaccatgttggccaggctggtcttgaactcctgacttcaggtgatccgcctgccttggcctcccaaagtgctgggattacaggtgtgagccaccgcgcctggcctctgggtgtttaatatatgttattctccaatttaatctttactgccaccttatgaacaaggatcatgcaccatttatagctgaggaaactgagctcagagatgctatgtaacttgtccaggattatacagataataagtggcagatttggaatctgaatgcatgtcaccctgatttcattttcacatgatcacttcttctgcattgtacatactaccttacacacaacgcacataccacattgtaagcactggactttgtacaaagcagatactcagcacaccttagtaaatgtttgtggatacacttggagagctctaaaacagacacaatgctggagaatcgtctccctgcctgtgtttgtaatatctctggtggatgttatcttgataccttgggagtatcagttgtttaagagataccccttatcttttctaggacaaaagtaagagttaccccaagagtcactgtcagattctcaccatgtcagagacactgtgctgctgcttttatacatactttcttatttcaccttcacagcaaccatttttataaatcaggaagctttctgtttcaagtaatagaagcctaaccaaaactggcttaaatgattacaaaattcattcattcatgcaactggaaagcaagaggcagtgtggtctccagggtcagcttgatccacgactctgaatgtctttcacttctactgtatcctgcgtgccgatggaggctgtttgtccctgaggttgttggagtgagttgtcatgttaaggtcaacagagagaacccaagtagcctcgtattttggaggagacacctaaaatcatatgaccttgagatttgagtggacaatgggcttctttctcaaatttagtttttaggtcctatgttccagtattttaatttttctctgttctcaaccacatggatgctcagtagaaacatccccagctttcaatttcatctctcgcaggaagcacagacaggctttttttgaaaggacgccactcattcattcttttgctcagcaaacacttagctcctactcagtacgtcctatgctgtgccaggtgctgggcccacggaaatgaagaaagcccagtccctgctctcaaggggctctgtagggagacagacacagaaaccactaactttgactgcagtgtggtgaggacaatcacaggaggggtgagtgaaaccctgtgtgaacccagccttgtgctaggccacataaagactagtctagttagattctagtgcttcagccttcatttctgttagagttccattgactagaaatgctgagtgacacctgtcagtcctacggctttggccattagaacaatcttgaaatgttcagcaattttcactttcactgagacttggaagcaaagcaccatgacagggcatttttttgatttgctgagttgttgctaaactgtggcccaacacaatttaggcaggattaacaccccatgtcctgtcccgtttcggcttgcatccactgataaatgcttctgttgcgtaacttgggagctctcattttgtaactagaggaagagagtctttggttggagtaggacagagaggagggttcagtctttgttccctcactgacccattggaagggttttgaacccatgtggttagaggactgaagtccagacatggaaggaactattcacgagaggagttataaacactgggcattggcggggcactgtggctcatgcctgtaatcccagtactttgggaggctggggtaggtggatcacttgaggtcaggagttcaagaccagcctggtcaacatagtgaaaccccgtctctactaaaaacacaaaaaattagccaggtgtggtcgtgtgtgcctgtaatcccagctactccggaggctgaggctggagaatcgcttgaacccaggaggcggatgttgcagtgagctgagattgcatcactgcactccagcctgggtgacagagcaagactccatctcaaaaaaaaaaaaaaaaaaaaaaaaaaacccaaaaaactaaaaactaaaacattggcacactgacctgctttagggcttgggtgacaaaatatttgtcaagtgagggagaaagacttcttccccttatcaggattaaacccagctctgttttggtaccttgagggttagaagtttgggagtatgtaggatttggggataatgatacaggcactggaaatcttccgatgggcactagactcagtgagctgtgtgggcagcagggtggttggtagcagctgactcatgtctctgggtatatgtgaggtaccccttttgggacccccccatagaaatcaccaaggactttttaggaaggaggttgaggcctttgctattatgtagatgggagcttaagtcagtgtaacatggactgaaggcaaatgtgaccatactttgtaatcataatcccagaaagcctgaacaaataaagaagcaaagtacaatgtaggaacaactgaaagaaaaatatttacagagtcaaactgtaactgagtaccctcattttttctgagacagagtttattttttctttctctcttcttttctcactcccccagtttctcccttcctacttagccctttaaaaaggcaaatgtaggccaggtgcggtggctcacgcctgtaatcccagcactttgggaggctgaggtgggtggatcacctgaggtcaggagttcgagaccagcctgttcaacatggtgaaacctcgtaaaaaaaaaaaaattagccgggcatggtggggggtacgtgtaattccagctatttgggaggctgaggcaggaaaatctcttgaagccaggaaatggaggttgcagtgagccgagatcgcaccattgcactctggcctgggtgacaagagcgagactccgtctcataaataaataaataatttaataaaggtaaatatagccttttacgttgtcttcaccagacagtccctacagggcaagttcatctaactatgtgcttaggagctccagaaaggaactcaagagataacatccaatttctacaaaactccctcccaccgggagactgccttgagaaatatgaaactctcttccatctgaggggtttttggcttagtcctgccaacgaaggtgccagcagtcaccagcttgaccacccagtagataaggcatgcagacccctcccccgacaactgcttgcttccttcgctttaaaagtgcctgctttctgctccacaattgaagcagtagccttagggaggaaacctgtacttcttcccctaagctagctttggaatacatcactttctttataccagaccttgctcttgttaattggaatctgcaagtggtgagcgactaaacctgcgttttggttataaaactccaaaggccatctgaaatactgagacctaaaacttacaatcgagatggatagggaattactttttcctttacttcctttactaaatccctttgtctccaaatctatcaagcaatagtttctttatctgcaaactgtggattatgttacctgtcttgtctgctttagaagggaaacaaaaattatgtagaaattaataggaatactattgaaacaggaaagggacaacttgcaaggtttgaagcaatcacatgttgagtactcagtcaaggctttctttttttttttaaatcaaaatgttgattgggatattttatgggtagcaggcttggatcccagcacttttccaataggggaacagaagcaccttgtaccgccccagagtttcccttcccccacacaataaccctaaagcaaaagctattattattatcatcgccatgtgacagaggaaaacttgagattgggggcttaactgacattacatcaagtctcaaaaagaaacagtggcagtttgagactttgatctacgactcttttaagagtttagattgcgtccacagcgaaacctgcacaaacagttgtcaacagcggctgcaaattacaggcttatgaggaacgtttgaaaaatgccaagagttctttcctcaggccaaatactatggtagataaaagtatagcctttggagccagaatccctgagtttgaatcttgcctgtgccacttggtagctgtgtgactctggctgcgtacttaacggctctgtctcagtttttctgttggtaaaatgaggataataacaccttctttgtagggttgttctaaggattaaatgagttaataggagtgagccacttagaatagggcctgttatatggtaatctctatttaaaatcctgtcagatacaccaaagaaaacactttaaaaatatctgttaaataaatcagtaaaacagaatcggggcattggttctttaaaagtactcccccacggtattctagtatgcagcttgggttttaatatctgaatgtggcgccttttgggatctcgcctcgcgagaaattgacattaacgaatgagtgaaaggagcttcccccccccccccctccaggaagatatagaccctgcaaacttgttagcaggaccttgcggacaccaaggaggcggaggcgttttccccatttccccttcgggagttgtagtttcctgcaagcgcttggtgggtctgtaaaccagcggggaactacaactcccacaatctcgcgcgcctcccgccctgcctcccgcccgcgtttctagcccgactcccattaccgcccctcgggggcggctgtggcggaggaacgatggccgacggcggcggccctaaggacgcgccaagcctgcggagctctcccgggccggcgccgcgggtcccgcgcgcggtcgggccgagtggcggtggcggggagaccccgcggaccgcggcgctggcgctgcgcttcgacaagcccattaagcaggccttctacaacaccggggccgtgctgttcgtgtgcctgtgctgcggcgccgcggtgctggtctacttcatcctggaggccttcctgcggccgctgctctgggccgtgctatgcggcacttttctgcaccccttcaagagctcgctgacgcgcctgggccgccactggctgcagcgcctgcaccgcgcgcacacgcccatcgtcctggccgcgctgctcctgccgctctgcttcgtcgactacggcgtcgaggccctgggcgagcaggcgctgcgccgccgccgcctgctcctgctgctcggcgccggcggcccgctcctgtacggcctctactgcctcggcagctacttgggcgtgcaggtgctgctggtgcacgctgccacgctcatctgccgcgggctggactacttcagcagcctgtgggtgagtgagcggcagtccgcccccgtcccccgcccgtggtcccggcgctctggggtgcaatcctgcagctgttcctcccggtgcaggggcgacgaggggccacacctgtgctgcagtgaccgtccgtctccgctttccttctcacacctcaggaatttggcggacattcttccaaaaagggggcgggcgtgatttgaaacagcctccctgcttttcgccttgtttcaatcctaataggccctcttagggggacagtgccctggattgagaatcgttatttcgctttgcagagagaggcctcagagcatggcagtggggcttggttttacttctggttggagagggcgggggtgcttcggccaccctcagttctgcgcatctgaatgtcagagctggaagggaccttagagattctaggccaacttgccatcctgcagataggaaaggtgacctcttaccaggctagggctacttagggacaaagaggggtttgggtgtcttagatttcttacaagtcctaaaacaaagcttgcttcactggctggtgctgcctctcagttcaggtgattcctgtataatttgtgcaaggcactgggtgctgagctgcctgtgcttcttcctctccacgctttacttttaggtaactgcttttgttgtgcagggactggtgtaccacagcacacctcctcccgcctggagtaaagcagctgaccgcgtgaaggggagagacgtagatttgtgatgcttggattaacctgagcttactcttacaaaaccagggagctttagaattggaaagatttcaaaggtaatctagtgacacaattcctaactcagactatattgtggactagttaattatccacatatttaactggagactgttaaaaacaagtggagatttagtgcgtaagaatgccaattgattcataaacagtaccatttacaaattgattcacttcttttgtcagtgaaataaagttcagtgtaccttgacgtcattaagttggaaaatattaattccccttatctgtctagcggtgttttggcttgcctgaggttattggcagagtgatgaatgacccaaaacacccttcttctcttgttccctcaataccacctcttggttcatgtttaaagttgatcgagcatatgttaggtgttgggctttgtgagaggtttaaaaaaggactaagatacaggtcccgtcttcacggtacatataatcctatatgaacatattctaatggagatgacagacatacagataaatgttcatgactcatccgttgtgggccacaggcccagagaatgtgattggtccaaagtcacacagctcatgagcaaatctgtggttcacttttatggaggcccagttcagcgctctttatcctttatcttgcagtttcacaattcagttaagtggatcgaatgcttcttagctagaaggcagaacactatgttctaagaaaaataagcttggttattttcctgaagaaattcagttttgtcaaagacacatttatagattctgctaacatttttgactgttgatactgctcaaggagcatatccatcaaactataggaaagtagaaaagaaaggcctgccacatgtaaatagtatattttcatgctagagtaagaagttgaatacctaagtaatttggcatgattatgaggcatttctaccagtctctctcagatactcagtggaaagagttgagcacttgtaaagaaacatccacagctcggcgtatacctttgagtatctttttactgaagataaaccctcatctttgtatttcatttgtgggttgtggatgagtggaagagaagtaggggccaacactgattagacctgggagtgggagaaagaaggtcaaactaattaatgattttttaaaagcttgaaattggccgggcgcggtggctcacgcctgtaatcccagcactttgggaggtcgaggcgggtggatcacctgaggttaggagttcaagaccagcctggccaacatggtgaaaccccgtctctaccaaaaatacaaaaaaaaaaaaattagctgggtgtggtggtgggcacctgtaatcccaactatttgggaggctgaggcagaagaatcacttgaacccgggaggcagaggttggagtgagccaagattgcaccactgcactccattctgggtgacaagcgtgaaattccgtctcaaaaaaaaaccaaaaaaaccttgaaattcagctgtttggctcaagtgttgggagcaaggaaaaagagagagggttaaaaaaaaacaaactcaacataaaagtatgagttaagtatttgtgagtagggagtggtagaagggctaaatttgaaagaaccttcaggtcaatctgagtttaagaaaaacaaggcatggaattgcattctgctcaagcagcacttaaggatggatggttggatgggggtgaggtgtacttgagaagacaaggagtccttgctcttatccaaaagtgctgattaaggccaggtggggttgcccacgcctgtagtcccagcactttgggaggcccacacaggtgaatcacttgaggccaggagttcgagatcagcctggccaacatggtaaaaccccgtctctactaaaaatacaaaaaattagccaggcatggtggcgcacacctgtggtcccagctactcgggaggctgaggcaatctcttgaacccaagagttggaggttgcagtgagttgagattgtgccagtacactccagcctaggtgacagagcaataccctgtctcaaaaaaaaagaaaaaaaaaagtgctgattaaaggccaggcacagtggcttaatgtaaccccagcactttgggaggccgagggaggaggattgtctgagcccaggagtttgagaccagcctgggcaacatagtgagacctcccccacccccagtcttttaaaataagaaagaaagtgcagattaaggcctggcattaagtgaaagtaggttatgtgactgggcaggaggcccactctggaccttttccatcccacagttcacagcggtttggctttatgagcccaagcagggctgtctggttatagaacatggtctttatgctttctaggctactttaaccatgagcctgctgctgaagagcagtatagatgagagaggcagagagaaaagttacctttaagcgaatccctgttttgatgacttgacagttcatccatttaagatccaacttttgagcatctgccatgtcccaggcactagattaggttcttttacatgggtgttatttcattctctcaatgtcttatgagctaggagggagggatttcatatgtgagaaaactaattcagagaactgttgatgctgtcagtaaatggcattcaatagacctagcagcagttgaagtcctgctgttatcaaaactctgtagtaaccttcaataaggatttttaaaaagttttccctaatacattgtgtttaattatttttagtggattgtaggccaggtgcggttgctcacacctgtaatcccagcactttgggaagccgaggcaggcagatcacctgaggtcaggagttcgagaccagcctggccaacatggtgaaaccccgtctctactaaaaatacaaaaattagccgggtgtgacggccgactccataatcccagctactctggaggctgaggcaggagaattgcttgaaaccgggaggcagaggttgtaatgagcccaggtcgcgccattgcactccagcctgggcaacagagtgagactctgtcttaaaaaaaaaaaaaaaaaaaaaaaaaagattccagttactaggaaaaaatcagaaaaatatcagcattctagtcatctagaaaccttattcgtccctcttctttcttcccttttatttttatatctatgcagttttccaggtcccatcaattttcctttttagtgtctttgggacctatgtttttcttttttcttcttatattttgagacggagttttgctcttgttgcccaggctggagtgcaatggtgtgatctcagctcactgcaagctctgcctccccggttcaagcaattctgcttcagcctcccaagtagctgggattacaggcacccaccacgcccggctaatttttgtgttatttttaatagagacggggtttcaccatgttggccaggctggtcttgaactcctgacctcaggtgatccaccttccttggcctcccaaagtgctgggattacaggcatgagctactgcgcctggcctggacctatgtttttcttcgtcactagtttttctttccagttcagttcctcttcatgtcacttgtagatttcttcagtctcctaaaactccgtgcttcttacaagtgaaacactaatcatttatgggatgagtaattctttttcagcagtttcaaatatgttaggagattgcactgacttagtaagtgatttcagaacacctaaaaaaaaaatcagctgttgcaccaggttcacatgttactcagttcttggcatcttcccatggtggagctgtgcaaggtaaatttgaaaaagctgatggcgtgccctgctccaccattcctctctgttggggggcattctgatcttcctcattctgttaatttagacttggtggagaatttgaagaccatttagttttttgcagtagtaatagatttgttttttctgtggtctctgatcccattgttcccatctttttaaagaagcaggaggtggagagagtagtggctgaaagataaaaacacctgaagttctaaacttggctctgccagtaactaactttgtgaccttgggcagaccagggccctcctctgggacattcagtcccaattgcataaagtgaggggttggcttgaacaatttctaagatttcacgatgttctattttacacatcacaagaggctcttcagcagtggacgttagtcagccattcactgctgacaccgttctacttttaaacacatttctaggtttgtttctgcttgcctggcagcaagaaacaaggagaggaaagtttctagtgcttagttttctcagttaaagactttgaatataaaaatgttgactctaagttgccatatgacaaagagaatggttttcacattagaattaagtggataatttaaggacctgaagcagttgctgcttgaggctatgattagggctgtggctccataacttgggaggaggtttgtagttgtggtgtttttgttttgttttgttttggggatggatttacgctcttgttgcccaggctggagtgcaatggcgcgttctcggctcaccgcaacctctgcctcccgggttcaagtgattctcctgcctcagcctcccgagtagcctgccaccatgcccggctaattttttgtgtttttagtagagacggggttccaccatgttggccagactggtctcaaactcctaacctcaggtgattcccctgccttggcctcccaaagtgctgggattataggtgtgagccactgcacccttcctgtagttttattctctctaaaaaaagcttgggaaactgttctgcaaaaatatgtaacagaagcaaccaagttgtttttccagttaatacccagatgacaataaatgaaacaaagatggttgaaaaggcagagtctctacttaatgttttctacatttaatatgttttttaaccagaaaagtatatgtggataatcgtgtgaaatgaaaggaaaatgtgattgcctattagttccctttacttgaagtgctaagtaaatgttgccaaattttatgcagtcttatgtagtgtctagcacattggtgctataaaaacgactatggaatgtatattttgaaaaggacatgttgttttggagaacataagtttggaaaaatatgccctcttatctgtaactgtggctcattgatttaatgcctggaataaaattcacacttgaataggtttgctcagaggctaaacatatataaagttgacttgttaacctcatgtttccgtgttagtgaagatttaagaattaaaaaactcctaagaggtcctagactagaaattgtgtgtgaaacatgcatgtacaaatccttatttttgttattttaaaggatatttagtgattcaaaatgttgacccaagtaaaatatgcttgttacatttgaaaaaacataagcagaacagaagtttgtatggtaaaagtgaattatccctttccttcccccgccctgcccctggccccgctgagatggagccttgctctgtcactcaggctggagtgcagtggctcgatcttggctcactgcaacctctgcctcccgggttcaagcaattctcctgcctcagcctcccgagtggctgggactacaggcatctgccaccatgcccagctaatttttgtatttttagtagagacggggtttcaccatgttggctaggctagtcttgaactcctgacctcatgatctgcccatcttggtctcccaaagtgctgggattacaggcatgagccaccgcgcccggccgaattatcccttttctctaccactattcccactattcagatgttactattaactgcttgatgtaaaggctcctaaattcatttctttgtccatgtgaacatataaagtagaaggtttttgttttttgttttttaaaacaaagatgagataacatacatatagctctgtaccttgctcttttcatttatcattgtactgtggccatctttccttattagcacttagagatatacgtctttcttttttttttttttgagatggagttttgctcttgctgcccaggctggagtgcaatggtgcaatctcggctcactgtaacctccacctcctgggttcaagcgattctcctgcctcagcctcccaagtagctgggattacaggcacatgctaccatacctggttaatttttgtatttttagtagagaaggggtttcaccacattggccaggctggtctcgaactcctgacttcatgtgatctgcccgcctcagcctcccaaagtgcaaggattacaggtgtgagccactgccctggccacttttttctttttaatactgctacagtataaatcttttttctccccctcccccaccatgccttttagaaaatgttttcaacagattttcttagctctgaatttgtattagaatactttgataaacatttttaaccattggtaattgtataatcataatgggcttaatataaactctaaagtgtttttataaatggccttacctcttgaactaatattacttctgcgaatcttttctgaggaaacacttcaaaatactggaaaaaatccagaagccaaaagaatttcctaaaggttaaaaatacttctttttctgtttataaagatactacataaccttagtagaaaattgagcacctgtaataaaacataaagaagcagattactccttgaaatctgccatctagagataatattttaaaacattttttgttgagtatattttcaccattataaatttacacacgaataaattgacactgtagcactgtatattgatgttcatcatactgttgaaagtctgactaattactcaatttttggagatagcattatttaaacagttcactataaaatgatatttaagttctcaattttttatattgtaaatggcaagtgaatatttttatatgtgtctgcacagtgtgcttctgtaaaacactcctaaaagtagaattggggagtatattttaaaatggttattttaaactggaatgaggtaatctgtgagtttcaggttgatagatgaaaatacatgcttcttgttagacaataaatttctcttaaaaaatctgaagtatgcagtctcttattttttctctccttgcaaatgatactaattccttatgcatacagataagaaacaaaaacttcttggaggtactgtataaattgtgacctccagttcagcttcttactaagggtagtacttactttgtcatctctgttcaacgtttgctcaaacacttttagtaatgattattccatttgtagatagctatagtttattggaaaaacctgtccttttactgagctgtgttatttcctaattcccacgtatttctgctctcagaaccacagaaaatcaagtcttatgcctctcccagatgacattttaaaaattatttgaagatagctacaaaatcttgatatttccttctcttttctgagcaaaactttttttttctttttcccctagctacatttatattatcatgttgtgatttctatttcctttcccaggctgaattttgttgtgtggtttggtagcgcaaaattaattgaaacaatcactttccctgatacgagtattgtacttttagaaataagtgcttctactagtcataggctgactcatactgaactgaaaagtggttcagatgttctctttccattccatacttgtacagttgagttttgaatctcgaagcagaactttgcatttcttttcatatagtttaatcttgtttggattagcccattgttctggcttcaggatatctttttgaatcatgatagattatctcaatatttattgacaactcagttttgtataactgatttgtgtaaaatcagttttttctgttattgtgcctctagtctttcatctaagtgactgacgtaatgtttaatagggtggggctaactgacgtacctctgaagactatccatttactgtggatttttttttaatttcaacaagttgtagttgtctaaattgactgtttttattttcccttgtgaaaatctgagcagcttttgcttatctttagtattctagcaccatgcttctttctccttaagattagaaaagtgcactctggagccagattcctgggttctaatcctgcctctgtcatttattggctgtggccttgggcaagtcacttctctgaaatctgggtttctttcatgtgtaaaatgaggatcataataatattattttgtggggttatgaggatcaaatgagttagtatacataaagcattagaatagggcctggcacataggagtgttatataagtgtactattattgtactcagatttttttctatgctctgcaatcagatctcaaattctttgaattcccagggttaattggtctggtccagcaagactggactttttgaagcagctgtagtctcacttcccatgtcctcatatttttgagcttcaaagctctttaatatttcatctgatagagttacttgaagaaatattttaatgtcctttttattataaaagaattagtgcttattaaaggcagtctggaaaatacagaaaaaagtgaaaggaaaaacaaaattttaccacccaaatacagccactaacttcttagtacattttcttttcctcccaccatatagtagatgtaatcacagcacaagtattttttgtattttacttctaacttaatatgatattgtgagtttttaaactatatagtctttgtttttaagaagtgattttaatggttgcataacattttattgagtgaatcgtaatcatttcccagttgttgaccttttaggtaatcacttttttcactgttctgaatcatactctgatgagcttctttatatttaaaactttttcaaaatttatcattatttagtaaggataaagtctgaaagttgaattctgaggttagaagctataaacatttttaagatgcgaagattatttgtattgatagatttgaccaaaataacgtaggagatagtttttttctgtcttttttagtaatcccatcagttcttttttcttcatgctctgaattatatagctcgaagtttctttttgtcttaatttgcttttttttttggcaaggttcatgtcatacttgacttttagcttcttggtcttatgttaattaaggtctttgtgctcagatgtgttctggattatgtattccctctgtgttttataaatgttctattaaaatatgagtttctgtgtaggctacgctggtttcttttgatgcgtcttaagctctagggtcatttaactttagtgtaggaagaactgaagagggtatcctggctgattcttctgttctgaagtcctgctgtttgttcctctaataatatttttttcaggcacacttcttcagctggtgcatcataactctggattaggttctaatcatttgttgcctagattatttcagcagggtcacacttcagctggctgctttcttacttttacagagttatttccccagtaacaagcatattttataagctgaaatagaatcttttaacctgattctttttggaaagctttccttttcttgtttttttcttttctttccgtttcttttctaaacattgatcaacagagaaaactgtaggaattccataagattagattcttaatttaaatccatggtttatgctttgaatattttatctcaagcatttttgtgtataagatgggttttgaactatgtatcttttgttaaacaactatttaatattactacatgagatttcaaatgcctagtatttcaaaacttaggttctccaaacgaggagaacctaggtacgtttctttgacaccatcaaccttcatcttttctgtgctatgtccagagcattcctgctgtatagacacttacagattttgtataattgtatgttcattttcacgtgtatagattttacagctgtgtctttcatttatttaagatctggacgttggtggttggctatgtgttgactgtttcattcaagtggaatgcaagcactgaacgctacttgagagcagtttcaattcctgtctggattatattgctttttcatttaggtgggttccttcttttttttttttttttttttaagtctagcctaaggtcagcagaggctgactgtgtgaatgaaagtgaattttttgtagtgtcatatgttgcatttaacattcttaatctttagaaaatgttatgctttaatctttcattaaattttaatgaaaatgatgtgctttaaaatgtctttaattatgttcattttccaaaaggtccttttaaaagtcaatacatcttaaaaagtagagcacccttggattctcatatcatttctgagtgtcatacttaggggaagatatagataagcagtcaacgataagaggtgctcagagacatgtgtgagaaccagttaaaggaactagagatgtttactctggataagaggagggaactggggctctagggtgggaaggagatagaggtaaggaggatataagacatgaaagcctatttctaatatttgaaggactgtcctgtgaaagagtgctttaaacagatctctgtaaccatgagggagagatgtcagagttgtgagttagcttcagagagacaaatctcttttccacataaggatgattcatgtcagagctgctcagagtaatgggttccctgttatgttagctgggtggctgctcagatgttgatttttcagcgtggtacttatggttgagactttcatctcccaagtttgagccaatggaaacactaagttctaatttaacaacacaattcagtaacccagagcagcagatagccttaaagtagtttctagagctactacttattgttaaaaataaaataaaaaacagctatgtctctgtcttcgtttgatgtcaaacaaagcattattctctagctttgttgagttggaatgatagaggaatttatctgcaagaacccgtatgtcagatatgactcattttgaactcagggaaggcagaggagggaggcaggcaggcagggatgttttatgaggttctaggtggactcagggaaatggttatgggtagggacctgtttcttggtgacttgtgaactttttttttttttttttttgagacagagtctcactccatcgcccaggctggagtgcagtggtgtgatcttggctcactgcagcctccacctcctgggttcaagcaattctcctgtctcagccccccaagtagctgggattacaggcatgtaccaccacgcctggctaattttttttttttatttttatttttagtggagatgggatttcaccatgctggccaggctggtctcgaactcctgacctcaaattagccacctgcctcagccccccaaagtgctgggattacaggtgtgagccactgcgcccagccaacttgtaaacatttttgcattatacactgaggaggagacattgatggttttgctgtgctcttttgggccattctctttcttgggagagaaagttcacgcccggtggtattttcaagaaaccaaggcagactttatggctttgagatctatgcctaattctggtcattctggggtgaagtagatggtttgagttcgggatggttttagacctttggtatacgttacaatagactctctttaatagaaccccattaaaggtaggcaggcatgtaccctatccatttgaccaggggcctctgagagcagggatgaacttaattttgagaaatcttgaagtttatctaatggacttaaatttttttttttttgcctgataagtaattctgtaactaatatatataccagattgttctgtcaaactacaaaactgagttttgtaaaaacaagtactaggtttttatttcactaaaaatgttaattcttaataatttgcagcatccctggctggctcatggagaattccagtattcctggttattgttttcctgatgtctgtgggtaccctctatgaaaaacagaatggaaaagagtcttctggtaagaaatagggcattctattaatactactctttgaagtattttggagagtagctttttaaaaaatgctatgatgaaacagctttgaatctatttaaaaacctatgatggtttctgagtggaaaataaattgtttaaaatattttaggttgttagaccatgatttgttttggtattattttattgaggcatgtataacttaaagttaaccataagccattgtattttaattttattaaaatattttatttttataaaataaaatatttttattttattttttagtgacaaggtcttgctctgtttcccaggctggagtgcagtggcacaatcatagctcactgtaaccttgaactcctgggctcaggggttttccaaccttatcctcccaagtagcgagggctacaggtgcagtaatcacgtaaaaatggcctacaggccgtgcgcagtggctcacgtctgtaatcccagcactttgggaggctgaggcaagcggatcacgaggtcaggagttcgagaccagcctggccaatatggtgaaaccccgtctctactaaaaatacaaaaattagctgggcatggttggcatgtgcctgtagtccctgctactcgggaggctgaggcagaagaattgcttgaacccaggaggtggaggttgcagtgagagccgagatcgcaccactgcactccagcctggcaacagagcgagactccgtctcaaaaaaaaaaacaggcatacaatatgtcacaatgttgtgcatccatgacctgtatctagttccaagacattttcattacctcagaaagaaaccctgtacatatatcagtacttcattcctttttatggctgaataatattccatggtaagagcacaccacattttgtttatttactcatcagttgatggatatttgggttatttctaccatttgtctattgtgaatagtgctgctatgaacttgtgtgcaagtatttatttgaatacacgttttcagttctttgtttacctatgagtagaattactgggtcgtatggtaattctgtgtttaattttttaaggaactgccaaactgttttccacagcagatgtaccattcagatttctaccagcagtgtatgaggattctaatttctttgcatccttgccaacacctattattttccactttttgataatggccagtccagtgggtgtgaagtggtatctcattatggttttcatttgcatttccgtaatgactaatgatgttgagcatcttttcatttgctttttggccatttgtttctcttctttggagaaatgtctattcaaattctttcccctttaaaaaaaattaaattgtttgcctttttgttgttgcgttttaggaattctttacatattctagatactagacccttatcaaatatatgatttttaaatattccattggtgggttgtatttttactctcttgatagtctcttttgatgcaaagaaatttttttgatgaagtccagtttatctactttttcttttattgcttgtgtttttgatgtcatctgacaaacaattgccaaatccaaggtcgtaaatacttacccttaagtttccttttaagaattttatatttttatctcttatatttaggtcattgatccgttttgaaataatttttgtaaatgatgtgaggtaaggatccaacctcattcttttgcctgtgtatattcagttctcccagcactgttgaagatggccttggcacccttgtcagaaatcagttgaccatatatatatgggtttatttctgccctttctgttgtgtttcactgatctatatgtctctccttaatgtcagttaacacattcttttgattactgtagttttgaaattgagaagtgtgagttctccaactttgttcttccttttcaaaattgttttgactattttggggtcccttgcatttccatatttatgatcagctttcctgtttttacaaaaaagccttttgggattttgatagggattgcattcaatctagagatcacttgtgggcgggggggagcattgccatctttacaatataaaaagacaaaaccacaaaaaccttacaatttatgagcgtgggatgcatttccatttatttcgttactctttaattttttagtgttttttttaattttaaattttaatttttgtggctacatagtaggtgtatatatttatggggtacatggaatgttttgacacaggcatgtaatgtgtaataatcacatcaagtaaaatggggtatccatcccctcaagtatttatcctttgttataaataatccaattatactcttagttattttaaaatatacagttaaattattgactatagtcaccctgttatgctatcaaatactaggtcttactctttttaattttttttttctgtttttgagatggagtctcgttctgttggccgggctggagtgcagtggcatgatctcagctcactgcagcctccacctcctgggttcaagtgattcttctgccccagcctcccgagtagctgggattccaggcacccgccatcatgcctggctaatatttgtattgttgtagagatggggtttcaccatgttggccaggctggtctcgaactcctgatctctggtggtccgcctgccttggcctcccaaagtgctgagattacaggcatgagccaccacgccctgtccatttttttaaactttttggtacctattaataaccacttccagcttccccgtaccctctcactatccttcccagcctctggtaaccatccttctgctctctatctctgagttcaattgttttgatttttagatcccacaaataagtgagaacatgaggtgtttgtctttctgtgcctagtttgtctcacttagcttatatggcctgcagttccatccatgttattgcaaatgacaggatctcattctttttttttggcggaatagtactccattgtgtataagtaccacatgttctttttccatttatctgttgatggacatttaggtttcttccaaattttggctattgtgaacagtgctgcaacaaacatgggagtcagcagtgttttgtagttttctttgtatatgtcttagacctttaatttattccttattctttttgatactatcatgtggaattgttttcttaattttccttttggatggtttattgctgctgggtagaaatacaacagattttttgcttgttgatcttgtgtcctgcagctttgctgaatttattagcttcagtagtttctttggtatattctttaggattctgcatatgtaagttcagtcatctgcaatagggatagtttgacttcttcctttctaatttgcatgcctgtaatttatttttcttgcctgattgctctggttggaatttctagtacaaagttgaatagaccatgtgcttttaaagattattttgaggtaccctggctgtgagtgacctatatctgcaaatagtttgttaaaggtagaggtctctaatgagttgtaagtggggaggttgtcaggatatagtagtggtcctcaaatcatcagatcagacttctggttacccagccgtgtggaagcagctgtgactggagaggtaaatctgaacacaaagcttctacagttgaccaatactttactccttgcttctttctgatggcgataataaactccaagagcagattactagctgcagtatgttttaaaaagaattaatttctcagataatatgtgtgttgcagtaaagttaggaaatacagagaaacaaaaggaagaaactaaaaatcactcaaaatctcactgtctacagattataccaaaatgttaactaatagttgttttgcctttaggcttttaaaaacacaaaaaaactagatcacagtgaacattctgttttgtaacccacattttaaacttaattatgtcatgaggaactttctgtgtcaatgaatacacttatagagcattatttttaacatcttcattttattctcatcatgaggctgtttgtggtactctggtgtatttgtacaggtaccttgtaaaagtttttaaaaattaatttgctttttattattttatttgataaatgagtaatatctaacaattgtaagccatatttttatttgtaaatatatatttagaattttaaaattcctgaaacaaagtaaccataactatatatctctctgacagtggaaaatagggaagattttattttattttattttatattttggtgtctaagttttctttgttcagcctgtcttcctggttataatctgttagactctgtggttatatatctgactagtggaagtaaatttcctgttttggcaactgctgtagaaagcttggcagtttcgacttgtttttctggttagttttatctcctttgttttctttcacctaatggcaagtgactcagacagttctgcttaccctttacctcttatgccagaatggtttccccttttgactgcttttgtccagggccaagtaagtaattgttataagaatataagtaatgcaagtctaaaccaaaggttgtggttgggttttctctacggtgtaaattctagtcatctcatgacagcagcctagaaaactgtaagggtaataagacttctaagaccaatttttgagcaaggggaaaaagaagaccatggtcgattatgaatactagccataaacttagagtagtgatgtgctgatatgcaagccagattgctgttatttgtattacaggctatgacaaggaaggaaatcacagacacacagaataaatgttgagtacagatttggaaatcttggttttatttattttgtttaactttcatttcaacctgtgtcaagataggtgattattgatctagaatccctttctggacttctagtctaaataatcctcatcataaaataaatcttttaagtgtttctttttcctaaatttctgagtatttttttcttcttgcccctaagaacatcgtttctttttaagaatcagaactcaaaccatctggtgtgtaatgggacagcccttctcttgtacttacagtcagtttcctgctgtagatgtcactgtaatataggtaggtacaggaatgctttagtatactgccacaacagtgtgtgcatcggctctttccttgtcatttccagtgtcccgttgtatcacttgctcttgttttccagtcacttgtgtgggtatctttctctatgtcttctgagctttgaaggttttgtgctgtggttcactagactcacagaattagtcctggatttcatcagaattcaaagcctgagtttggttcctagacccagagtactcttctatttatttattattcttattttattttgtttttagagactaagactcgctctgttgcccaggctggagtgcagtggtggtgtgaccatagctcactgcagcttaactcctgggctcaagcagtgctcccacctccgcctcagaaaactcttcttgtggatcattgctgagttagtttcagtggttgcttctgaacccaagggtcttactcagtggttttctcttagacctgagaagttctaacatagtatttcccaaaagcttaagataataagggaaaaatatttaagtgcctgtcatgagccaagaactttcaagtgcttttaaatgtgctatctttttaaatccacaagcaaacaaaacagaactcaaacaaataaatctttgtaagatagatggtatcttcatttacagatgaagatacttctagagattaactgactagcctgcagtcacacaggtgactagtggagctaagatttaaacttaggtccttggccaggcataatggctcatgctataattccagcattttatgaggccaaggcgggaggattgcttgagcccaggagttcaagactaaccttgcctggtcaagatagtgagaccctgtctctacagaaaataaataaatacataaaaataaaataaaataaaaattagctgggtgtggtagtgtgcatctatagtcccagctactgggagggttgaagatggaggattgtttgagcccaggaggtcaaggctgcagtgagtagtaatcatgccactgtactccagcctgggctacagaggtgagaccctgtcttaaaagtaataataatgataataaataaataaacataggttcttgaccctaagcccagcgttctttcccctccccaggctctttgagtaagtgtcagtcatcctgaaaaagtattgagtactcatccttcttgcatcagttgtagttgtcagctccttcagttttccatattggtcctgttgacttaacacaactacatgacctagcttccttgcctcctagatcccagaaaccttacttagtagaaaccttatggcttagtctgttttgtcctgctgtgacagagtaacacagacttggaaacttacaatgaacagaaatttattggctcacagttctggaggctgagaaggccaatgtcaaggtgctggcatctggtgaggatcttcttgctgtatcatcacgtggtacaagggcgagcaagagatggctggggctgaactcacccttttataatgacattaatcctacccatgagggctgagccctgatggcctaatcacctcttaaaggtcccacctgttaatactgtggtaacggcaattaaatttaacataagttttggagcacaaacactcaaaccatagcacctggaatccacgttcagtatgttcccttggcgtctgaggaaagaggtacactagcattgttatctcctataagtaaggctgtgttagactctttaaaaatactcttagttttttttaagcagtctagtgagattggtgttatgcttattttacaaatgaagaaacttaggctcagagagccattttctctgagtataagaaatttcttcaaaagttagtgaaacaatcatcagatatatctataatagcctggatacccagcctgagaagtaccagcaagtacagctgagtgctgttcctcctggcattggtaattgtttgtaaatgactagaaatgtctttgcagagatgaatcctgatagttgccttacttgttttgggatagcatgagatatgagtgaacaagtttggttcagtcaagcccaaattggaaaaagggagcaaaccaaatgttttactgctcccctcccagtccccacttctgatactgcaagttaaacaggcctagagaaaagtctactggtccatctccaggcccttgtgacgtgatactagaagccattgagagggagttgtattttccacattagtaatggaaacagaagccttcttcaaagggaactttgcaggctggggaggtgttatttggtatgcggtgcctgcttccaataagcatgtttggatgtatttctggtaactgctgctatccctgtgaaaaagaatggagtggatcaagaagtatctccttatttagactggatttaaagtatatttacccatgcttattaaaaaagttagtctgctcatcgttgagttgttgtattaacagacactgtctgacctgtggtctctttcttgtgtgccggactctgagtttctgccccctggtgctaggctgctaatgtcagtagcatgcttgtttggatttgtgtagatccctgttatttggcttctgcttaatgctggccctgtctctgggtagattgatacctgaaaccttggatgttctttccttttttttctttagtccttgagtcccaagattatgttcccttgtttatgtgcctatttttagctgtggcttttaaatacaataccattctaataccacaacttggccaagattctcagtcctggcattgttctgttcagtttatcatctccctgcctggactgttgttttttgtttttttttttggactctgattccaggccaattccttgtggtttttgaggtgctgaagggtatcattgagacagaagtcattaaaatacagatctgttggataaaagcagtttgccaaatcttatattcataattttcaaatactttgtttattttctctgtgtgctactcctttcatgcttttgtgaagtctgaggtgctcgaaaaatgtgctgagtcatttgtgtattaactagaaaaatagtgcagtttccattgatgtagctaagctttactgcatatttactgcatattttagtgccattagcaagttggagagttattccttaagccacagttttgaagatttaattgattgggtttagctttttctcgaatctttcagtgcctactctacagatacaagatattttgcttagctctgtggagagatctaaaaatgtctactaagggaagatagatggctatactataaagtagaaaggggaggagaggtacaaagaaatactacagaagggttagtggcttctgcttctagtttatactgtcgaagccaacagattgatattgatgatgatgatagctaacatttattgagtacttcctacatacccagcattgttctaaactttatttatttatttttcaagacggaatctctctctgtcgcccaggctagtgcagtggtgccatcttggctcactgaagcctctgcctcccgggttcaagtgattcttctgcctcagcctcccaagtagctgggattacaagcatgcgccaccatacctggctaatttttttgtatttttaatagagacggggtttcaccatgttggccaggcaggtctggaactcctggcctcaggtggtctacctgccttagcctcccaaagtgctgggattacaggtgtgagccactgtgcccagccagcattttatatgtattatttcacttcattctcaaatgagatacgaatttatgtaagcctcatttttacacatgaggagactgggacatctcgacgttaactaacttgcctatagccatctaagtagtaagaatagacctgggatttgaacctggggagtcttctttcctcacctgtgcttccagccactgaattgtgctgcttcctcatagcaaatgtgagaccttctatgccctggtcccaacctccctctgcattcttacgccactctgctcttctcattcacactatcttccggtcttattgaacttcctagagttctttgaagagggcacctctgctttttcttgcctttgtgtcttcatatttgtttttttgtcttcctgaaacacttttctacccctgctctctaagacaccagtctctcaggagcttcctctccaagatagaactgttctgtcttctttatctagcttacttttgttaaaatggatttaaaggatggcatctttcaatattcttgtcagacagctcctttggaaacccttcccagacctccctgcatggatttgatttccacgctgctccctaacagtttacacttactttacattagctcttaagtatcagactgaatttgagaccaggggcttagtctcttatatcagcatatagcctagtcgcctatttggtgaatgaatgcttagtaggcatttagaaatgtaagataaaatgcagctgaactgaaagtccattatttgaagagctatccaatgatcttgttattttgcaaaaaccatcaagggacttacttttcttacagtgtctcaagatgagtaaccatttaattaaattacttttgaagaggccagttcagtaattaaagacccttgactagtctgtaatcttatgtaagagagaattcttaatttttaaaatttttgacctgaaggtctttgtttttgtttttcctttttctactgtactgtcccaggccattaggtgttcccaaactttgctcttgagtggggcctaagagatccctcctgggtgtactgctgcaaagctaagtcttgccccatctctggtgtaggtcagtttgtttgtggaactttttatttttgagacaaagtctcactctgtcacccaggcagagtgcagtggtgtgatcttggcttattggcatgatctcagctcaataatacgatctcggctcactgcaacctctgcctcctgggttcaagcgattctcctgcctcagcctcttgagtagctgggattacaggcgtgtgccaccatgcccagctaatttttgtgtttttagtagagacggggtttcggcatgttggcgatgctggtctcgaactcctggcctcaggtaatccgtctgccttggcctcccagagtgctgggattacaggcatgagccactgcacccagcctgtttgtggaacttctatctgaaagtctaaaaataactctaatatgccaagaatcttcatccagctctgctatatattctctacctaaccatagtctggaaaccgggataccttcgtctctttgattcccttcattgcttcctcatcaagtgtggtccgctttgactcttctacgtctctttaacacagccgcttttccctgtttcccctgttgtggctgtagaccacactggcatcatgtcttgcctatagtactgcaacaacttttctccatacgttataggtcccctctagtctctttttctccagacaagcaagaatggtcttatatctcaaatggattatttatttacagggtggtgagaggggtgagaggcagttgagtgtggttataaaaggtcaacacgagagatccttatagtgatgatgctgttctgtatcttgtgtcaggggaaactggacaaattgtggtacactgggattatttcttgcaactgcatatgagtatacttttatctcaataaaatttcagtgagaagaagactactatcctgtttgaaactcttcagtgcgttcttcttcctcttagaataaacactaaagtccttcatgtggtgttctgtgatctgcatcatctggcttacctctccagccttgtttatttgataccagtttcttactagctgtctgtgttccagacacactgaccttctttcactgtctttaatatgccgggttcttctcacagctttccttctgcccaagatattgttaggatgtcacaagatacccagcatttctttttatagcaaccataatttctatacacacgtttatttgtgtggttatttaattcatacctttactatactccctgggggcagggtctgtgtctttatccccagcacacagtacatgtaagaaatgaaagacactgtttttctctgtcagccctttctgtcttattggcatttcaggaggaccttggatacacaggccaggagagtaaggtcctaatccagaaatctaacttaggctttcctctcagaccatgagtttgaatttctctcatattgagagatatgataccctatctaaaaatgaactctttcaggtcacaggggcatttattagaggagggacagagtatgactgagcaaggtgagtactcttatcctgatgtctgaatctaccaaagatccacctcaggctctggcttgctgctatctgggagagggctagctttggatatttgggtatgtggagttaattaacttggagctgaaattcatcggctttctgaaggatcatggctcttttcattggggtgacagaatcctatgttgccatacggagtcttggcctaccaaaagtaatgtctcagttgtatgagtgtgggtgtatgatttggtgactaggaattgctagtgttcttagttgtgaacaatagaatctaccccaggtagtttaaataaatagtaggaggtattggttagcatttacaatttttgcacatggaatttctggaaagaccagacaattaatcttggaatctgacacaggtggaagcagtgcaatcaggagaaatgctcagtgacactgaaggactgtttgggcagagggccacggctgctgctgctcgccgtgaagttagagatcagacatcagaacttctgctaagttgctgcggaaaaaccatatgccttcctgactgactgtgtttgatacaagagctctggctttcaaattacagtgtgccacttcaggctctcaagtcctgcacaggtgtacctgcttggtagaaactgtgtcacatgtgagacctcggctgcaggggaatccaagaaatacaatttttttagctctccagtctagtgtgcaagaaagtgtgctagaacccgatgctatgtgagctattcttccttgtctgctatagaaggttaaaggttgacagacttcctttgccagtgaatgttttacttgaatttagtgcaaatgattgagcttggtactacctattaggaatttaacatggaaatatataatgtgaaacaacgtcatgatgttcctttagattttcaagtggtggattttgcctgtactgagttatgtaatttataaatctatatggttttgcataatagccatatattcgcatactcatttgtggaatgttgttatgaccaccaattgtggattatctcgtactaacatgagacctagtcatacaacatagcctaagacagtcagatcagggagctcacagacttgatgtggtagtgtttttcaatagaagtatgcattaaaatcaacttgttaacaaatgtaagtgtgggactccaagtttacatgtgtagtgtctgccacatccaccagcattaagttcccaaaggaggaaggtatacagagagtcaagggatttgcttttttagcacactttcatgtcaattcttaatggttcttccttggtgaagaaccacttattcagtgggtcagtagtaaccattttattttgttgttgttgaaaatgttggactgtgtttaaatttgcagccattatttcctactttaaagagttttgaaaatggatgcttcttttacaggggcagagttaccagggcaggttatctccatggcagcttctactctggcaaacttggccatctctatcacagggtatgaatcaagcagtgaagaccagccctccactcagcctgcaggtgactgatgttctggtgacattcaaggttattctggaaaatgaaatgtacatagaaagtaaaattcaggacaccagcatcacaaaatgctacttactcctgctgatccttcatttattctctttggttcctatttttatgcccttttccctctcatctttgttctcatatatcactttttaaatacatgtaattatgtaacttcttgagtttcttaccttggttctttgttctttcctttttaaaaaaggcttttcttatttttcttctgttattcattgcttttgtttttcttattttccttttctccgtctccatttacctttcccacatttccctccactttacgcatatcttatcttgatttcttattttccatttctttcttctacaactgtcagttctcctccatgattttattttgccctatctcttcctgttgttttttctttcttttgttcccttttcccaaccctttttttggggaagacttttattttccatcttgcagtcatccatttctctgtcattctttctctgaaagtttgcatgcttcatgtgttaatatattgacccctcaaacagacccctctggttgttttggactcgttgtcctgtgtggcctggctttgggaattgcaggctcctgaggaatccagctggtagatataccagctgtagagtcatgctgtactcttgcagagttccagaatgtaaaaggccaccttagtctgtgctgagagatccattagtgccagaggtatttggagttagggaatatttagagtgaattctccttgaagaactgactttagaaatgtcagctaagataaaggaatttggtgtagtaggaacacttatttttcttgcacatggaattatgtttccaaagtggagaggaaatgatattttggttttggactcattcttccaaatatctgtcacacccaccatcatgaagtttccaaattagaaagataactcagagcaaagtcaaacaaaagcatctgttaactagcttgggctttagccctgcacttttaagggtagaatgttggtcctagtgaggtgagctgacttaccagggtgcaagtgatctcagtagtaaaaattgactcatagctgaacttttaacattaaaaacactaaggaaattatgatacagcacttggtgggctactgtatgattgcttatgaaaattatgaaacaacagggaagtcattcattcacttatttagtgagcacctcctatatatgagatactattgtatgtgccaggaattcagtggagggagaacaaaacagacaaggtcttagctctggtggagctgactttcaactgaagagaaagaatgagaaaggataagtagaacatgctacaactatgtaaaagaccagggggaaaatgtgaggttgggattatgggagttcttatttcttttctcttttttctagactttttttctgacgtatgatacttttgtaattaacaatccacacattcaacgtgacatacttttgtaattaacatttttttctaatggaaggcaaaatgcaagttttaggatcttaataattttcattattatagtatatatagagtaatactactttaagagttttatgatttctgatgtgtatggtatatcttattaaaactaggaaatagaaataatagcaccctatagtaaaatgtaacatggtggttgcattgttagaaaacagtgtcttatgtgaaataatccagtatggtttcctttatttgaaaatcctcacccaagaaatctgtcattgtttttgtatctcattcatgtttatatattctgtttgaaagccctgggttcttgtaagattggttggttccattttaggtgaaataacactgaaaagtcttcttgtgtcagaaatgtatataaatacacctaatctaaagttctattgaaagaaaagggatttttaaatatagaaattctagtatatgttagcatttgtttctttaaatagtttgaataagttttatgggataattataattctcagctactttgtcatgtattttgttttaacgactcccaattctatcaccaactaacttagtcttcctaaattaaagctctattggcattgtaattctccatgtttttcagtgcatatgcaaacataggtccaaatatttttgtcttttttaacccgatgtaatcataccatatcagcacattttgaaggcctgaaacaggctagcctaatgagtggctctgtattcccatttcctcatgtggactaatgcggtgtgtggtgtttttcttttccttttcagaagcagtggacaggggagaatccgctccaacgttgtccacctccccttcaccctcctccccttcacccacttccccttcacctactctgggcagacgaaggcctgaaataggaacgtttcttagaaagaagaaaactagtgacatctactttgtgtctctagtttgggccattgtcgtcatgcagatctggttgaacctgtggattgtgcagttgctgccagtgccgattgcaggtcgttatctggttaagtacgatctcgtcttgtctttgaagattgatttttttctttttttacttttggattttaatatttgagatacatttaccgtcttgcaaagtaaaacaatcttatgtttgcatttaaatagtaaacaaacaccatttggttaatttattactttgatacatctttaatatttcactttttttttttttttgagacggagtcttgcccaggctggaagtgcagtggcaccatctcagctcactgcaagctccacctcccaggttcatgccattctcctgcctcagcctcccgagtagctgggactataggtgcccaccaccacacccggctaattttttttttatttttagtagagacagcgtttcaccatgttagccaggatagtctcgatctcctgacctcgtgatctgcccatctcggcctcccaaagtgctgggattataggtgtgagccaccgcgcccggccagtatttcacttttaagctcaaaaaatgtgtttagcttcttacaatttcatgtagtatttgagattaatagctccatagagagatttgattgtttagccatccatgattctgtgaaggagaatgttaacaatatctgtgttttggaatttgaagatcgaatgattttttgttttttttttgagacggagtctcgctctgtcacccaggctggattgcagtggcgcgatctcagctcactgcagcctttgccccctgggttcaagcaattctcccacctcagcctcctgagttgctgggactacaggcatgcgccaccacccctggctaattttttgtatttttagtagagacggagtttcaccatgttggccaggctggtctcgaatccttaccttaagtcatccgctcacctccgcctcccaaagtgctggcattacaggagtgagccactgcgcctagctgagattgaatgatttttgagcgctactcttagggaagcacgttttaccttgcctttttaattcaaaggaaatgtaggctttgagaaatacatgtatgcaaagtcttgtgatttggcagaaaaattaaattacatgtatatctatattatatgtattacatcaaaatggaatcatagttttccataatccattaaatcaggtctttgtatcttaatgctgtggtaatttaaggcccacctctattgttttgattctctctaaaactgtctttctcctaagactagaaagagcaagggagagttttctctgacaggtgcattgtagaaacatcttttacctaatattttcctgattatttgggctctcttcttatggcagccatattttgtgccaaatttattaagtccttagtggctgctgtggattttgccttctgagtaccttctacatttgattactcctcatttcctatgtcaaggtttttcactattgattaaaacgtaatctgatttttggaagctgctctccactgtagtctaaaagtctaaacttattagcccatttaccttctagaccattagttttcatcacttctttttatttttcctcactcaattggatagttaattaaataggcattattttttaacatttattatgaccagagcatggtatagtagtgcctgtcctcagggagcatgcaatataaatggttgaagtttgtatctgtattttttttttttttgagacagggtctcactttgtcacccattcaccacagcctcgatctctcaggctcaagtgatcctcctgcctcagcccctcagatagctgagactacaggtgcgtccactggctattgttttgtattttttgtagtttgccatgttgcccaggctggtctcaaactcctggactcaagcaaacctcacaccttggcttcccaaagtgctgggactatacaggtgtgagtcaccgtccccggcctatatgtggttcttctgtcctcaaacagaacttctgttaggcagttggaacaagatacagctttaattaagcaagtcacagagcagataccatggccatgcttcctgttaaactgagtggaacagtttaaattgctcttctagattgttccatacttttttttttttttttttttttgagatgtagtctcgctctgttgcccaggctggagtgcagtggcgggatctcggctcattgcaagcttcacttcctgggttcacactttctcctgcctcagcctcctgagtagctgggactacaggtgcctgccacaacgcctggctaattttttgtatttttagtagagacggggtttcactgttagccaggatggtctcgatctcctgatctcgtgatccgcccgcctcggcctgggattacaggcgttgagccactgtgcccggccctgttccatacttttttttttccagatgattttattatgctggcaaactgtgtgtcaaatgctgttgcaactctcttttccttaaagtttgttagcaggaatttcatttctcttagttatagcttaaccttctagtcatcataggaatttgacatgatcttgggacagcaggctgtgaataaggtggcccctaaaagcttttctacagcttgtaattaccctggacttactgaaactataggagttcttttagggcttttgtagggatttaaaaatggtaataaaggaattgttgaacttgtgtgtaacactgagctcatggttcaaaacagcaaattgtgaacctttaggttgcaaggccagagctaagaacacaaatctctagagttagggaaattatgtactgattgagatacagggtccaaacttgaaggcaagcctcacagttgagtaacacttctttctggccctaccaccttcttaattggcttctaacaggaagcttaacctctgcttaaagagccacttcactgcccaactccaggaggagacagtgtggtttgagagtggtccccactgaagttgccgtgcacagccttgggccatttgtagcagccctgctagtattcagcttgcttctctactgaaccctggcatctgttcagatgttgagagcagcatcaaatggggaaataggaacaacattactctgcagtggtacaaaatcatgatgcgtatggaataccttatacttttctggtcactaaataacgagcaactaaggaaaagaagaatatttgacaagaacagctataaaagccaaggagatgaggaaatgtcaggggtttgtattatttacccaggaagggggaatatgcaaggggccagaattgtagtcactgaaatcttcacgatgagattatcttttgtttatgtgggctgtaaaataatccctgactctacaaggattcagacttcaggaagaagataatatataggcaggtggggatggtttgaaaagttacttggtccaattccatctgtgtggggagtactttgagtcccaccctgctttttaacattgatcttctttttaatactagctttgttgttttagaaaggttttgtgaaattaaggtaccttttcatgttacaacttgttaatctatattttgtttatatatgtattttttgtctttttttagtctggatactcaaaaagcttgtcattcactttggagttgtggatttcctagagaaacgctaccatgtgtggtggggcattatagaaagcttcctgaaggagcggcagggagctctcgcgccttggcccattgtcgggcttggaaaattcttgttaaaagttgatagcaaggtattgtattttaaggacttgggctgtcttaatggagttaatatatttcgtggtttgaacttttccattctatggtgtttatattgtaactgttgataacacatgtaatatctaattctatgatgaaagtttaatgtttaaaattatggtttacacaaggataagatgggtttactttaaataaggcttgtgtaagtattttttcctcataaaaatgggagaaatggattttctgatttaattccttcattatattaggaccaaattgaaatccagagaggttaagcgacttgcctaaaattatgtagctaggtagtggctcagtttagtgaatatttttggagtaattaccatatgtcagatactgtattaagtcctacggaaaatcagatgaatcatggaaaaccagatacagaagccttgtttattggggaaagacagcagttgataaaaattcagagatggcggttagatttagagccttagtggttaaagagcatggactatgaatccatgaagtttcctaacctttctgtgccttggtttccataccagtaaaataggtacaatagcacctaccttgtagaatggtggtaagggttaaatgaggtaatatatgtaaaatccctagattattgcctggtacacagtgagctctatgtaagtattaggaatttgtgtaggaaaagtgtgtatgggatacagtggcagcactgagcaagaaatgactcactgttcatagggtcatgagaaagggaaggttagcagaggaagtgatactggagcaagttttgaagcacaggcgggagtttcttaggtagacatggccagaagggcaagcagacggagcagtgcaaaggcatggagacactaagcctacgagcatgcaggttattttatgtatttttaattgttggattcccaacaaagatgtggttatcatcatttcaatcattatatatcttaaaggaatactacattccgttgattttaaaactttgatgtgttacagtttttccgtccctagtttttcctttgtctgggatggtttccttctcatgctttccttttcttttcatactatggttgcattctctaatgatactccactgttcttatcttctctttctcaccttaccccctatcctcaagctctggcactggctaaataagaaggtaaatgaacacccagatgttggtttttactattgaattccgtaatgcccctgtatcgcctttttcactctatgtttctgtccatgtgtcaaactaagtttttgttttcaaagttttaattataagctatggaaggttgtgaagcatgaatactatcacagtataatttggtaaaaactcagcaaaggctgtctaggatatggatggtatctccttgctcaggtgtttgtaagaagttctgtctcatagtccttttgtcccctgtaaatccagttctgtaaatgtggctcagcctgatattctagtctcctttgatgtgtgaaaacacattaggcaatagttattgtaagggcaagagagaactctctgtttgatactttttctataaaagacacaggaattttttaaaaagacaaatctgtgaaatatttgtatggtttccttggcagataattttatatattgtctttttttaaataactagtatttcaaaatttatttttaacttaaaacagatagtagtcatgacctgtgacatcgaattttgtgttttctccaaggtatgaggttgtgtctatggtaaatgcttcacatgattggtatggcattataataggcacacttttaataacttcaataaaggctaatccagatacattaggaatgttgtacctcgacatatagtccacatatcgtaatgtttaaattaattttaatgaattaaatagccaggccttgtggcacacacttgtagtcctaactacccaggatgctagggcagaaggattgtttgagcccaggaattcaaggttgtagtgagcaataattgcaccattgcactccagcctgggtgacagcaagactctgtttcttaaaaaaataataatttcaatgaatctctaggacagatagcaagagatgacatcatttatatatgttgtgtttaaacataataaaactatatatatgtcttttgtggaaatattatatcaggccttaagaaagatgtagtacttcttgaaaatagatcaaaatgagacttttggatgggttaggatttcatttttttctgttgaaatagaggagaggggagacttgacaatgcctaaagttttaaagttgagttgaaaggaagcattgtgtaaaataaacactcccacactctcacatggttgtgtatgtctccattccctataaaactagtatgggtaagtgagttcaatccttggcaaatgatgtgcaaatataagtcacgttttaaaattttgaccaaagaatgtggtttctaaaaaatttttatttgttctaattgttttttagagacagggtcttgctccgttgctcaggctggagcagtggcacaatgaaagctcactgcaactgtgaacttgggctcaagcgatgattttgtacttttcttcaatttgtgttatattgaaatgaaattgccctcaagagatgggggaaaggagaattaaattcattggattaaatttgatttaaccttcagtggactaaatgagctagattacctaatttatgagactacttcataactgaatcatcgagttaattttaaaagatctctaagatcaagtcctttttttctttcctttgatgattccatataacatagtaaagcattggtgtaaagatagagtaactgcttgagattttgagcgggtacattccaagaaaggacatacataagttgagaactattttattacattacatctcaaagtcagaaaattgcagcactgggtaatgttggtatgtagaaatttcaagtggagtgaattaggaaaccaattcaagagaagagagggtgagagagcacacatgggttaattgaaatgtaacccatttctcaagagttacttgttttatttcttttcctttttttttttttaaatttgagacaggatctcactctgtcacccaggctggagtgcagcgacgtgatcttgactcactacacaacctccacctcccaggctcaagcaatcctcccacctcagccgcctaagtagctgggaccacaggtgtgcaccaccatgcctggtgttttttttttttttttttttttttttttgtatttttagtagagatggggttttgctatgttgcccaggctggtcttgaactccttagctcaagtgatcagcctgcctcagcctcctaaagtgttaggattataggtgtgagccactgcacctggctttgttttatttcttagtattgattatttgcactaaaactcaagtggaattttgtttaaaaacaaagcaaaatgaaaaatatataggcccagaataatgaaagagaagaaaaactcagtagtggaatactttcttaatagcttgataaataggccagttagtgtagaagttttagagtatcttttggtgtaactataaatttactgacatctctaaatttaaaaaatgcatgcccttcattcacatttgaaacattcggaatgtcattttaaaattacttctctttttttgaaaaataaactttaaaaattaaagtaacttctcagtctttcagcatggaaagattggggacatttagagacttggtaatttccatgcgagggcaggtggattgggttcctttgcccaaagcagaacgtgggacaggatcagcctcgtgagatagcacgtctggcctttggtccccttctccattgcttcctctctttatgtttctcttcctatctctccgagttgctgtttctttgtgagtctttttctattcagtctttgtgggagttggttcatcttttcctccatctaagttttttatcctcttcactttttttcctcttttcgtccttagttttatgtatcaactccccgtgcccccattttttttttgcttgaccttctctgtttccttttattcttgaataaatcttagtctctgtttctctttcccactctttcctctctcttactgtctcccttcttgtcctgttctcagctaacttaactggccacatgtgacgaaaacaacaacttcttagcttcttttttgagcatcttaaataattttgtttattttaaatttcaatgaaacatccaaccctcactgtcatcccttggatatacgtttttatttaggtgactgaatttttttcaacctttatggcttgtgatagaaaaattttaccctaacttaaaactaaaaaattggatattgtaatgttaatgtacctaatatgtttttgaatattctatgttttatatgttaaaaatactcaaacatgtttctaagtagaatatcatttacatttaaaaatacatttcaggatatgacttttctgaaaaaaaaaaaatagaggctctacattattttcagaaattgtaatttgtggatacaaatacagtcttaattctgaaattattttatttatgcttgcttattcaaacacatagtaattgaatgcttaccacgtgctaagcacttagattttggagatacaaagaggagtgatacaaacctagctctttccccaggaagctgccttgataactagttttcaattggtttctgattgaaagttttcagtttcattgattttagaatttaacttcagaatatgacatctgaccttccatatcttagaaacctgttattccttttttttaagtctctgcattgtctttgatgccttggtagcatgcactgaaaattaactcttctgtttgaagctgtaattgtcaagattaaagattaactttttatctttgagttcactttagcattgatctcttagtgacagtgcccttgatgaaaaacagataaggggggcacaagcttataaacgtcaagtgaaagtaaatgctgcagaactcatgttgtttttttaaccaacattctttgcttttggatgtttaattcactggagagcataaatcagatctaaattaagaataacttatttagcaatgctgttgctcaccttggggttgagcagtgcattgtggtgtttcagcagttattaatctagttaaatgtagttttgaaatgttagatggtagctttgcatgaaaggaattctagcaatctatcaagtatatattctgaaaacacaagttgtttaaaatgtaggattatttgtggttgtgaaagatgaaggaagttatagcaagataatgtcagatagcatttagggaaagcacagttttaataactgattaagaaacagctactacattgattatatcaattatagtcatgtcataaagcttatgttttcagaagaatagaaacttcaagtagaatatcagattttaaaaagcattttattatgtattatgaaatatttcaaacataaaaagatgtaaagactatctaccaatgactccccccttaataaaacaaattaacctgaaggctgttttgtgcccctccttgattgtgcattcacctcccaacccctcgctccttgggcaactgttatctttgttatttgtcattgccttaacattagatttttttattactgcttttgtaattctaatgatatcaaatggaaaaaatattttgaatgcaactcctcttttaatttgctccaattttatctgtattttttagtccatgcctgtattataagtattataaatactatctgtatatacttttgctaaagtcgtgtgtatttgttaaactgatgatacagcttcataagattttaggtcagctaatggattgtcaatattttgtttagaatacttaccaggttataaattacaatttgaaacatagatatcctatagtttgagaatttgaacatagatatggattatgttgaaatcgactgcctttttcttagctatgacagtaataaactatataacaacagcagtaatgagtactgtgaagtttttaaagttgcttaaagcttttattgctttaattattatgccataatttgctttgccatgctggagatcctgttttgtctttatgacaattgagtatatgtatttttaaagttctactttaaagataagtaattctctttttcgtttttgtgcagatgatcatctggttggagaagatgttagataaaataattagcattttcatcatatttttgttagtgataggaactcttcttttagccctactcctgactgcaaaggtagagtacagtgattattattctcattaataaacccttaattgttagaattgtagtctggataaaaagctagcagaaggggcatggaaaatgttaacttgatttaaaagtatgtacaatagctaaaggatttatgatttgtatattactaattttgccatgaatttgcctagtatattttcttttcagacctcttttacatgcatttttattttatcgaaacccttgggagtaaatacaaatgaaaaaaatgagataatgaagaacaagtggcgcttgttttttttagtttaataggagaattaggatctggtcttatgaattctaatctagttagtattcttcactagatcagaatttgctgattaccaccttccatccttgtctcattgatccttctgctgatatataccatagcacctttatttctcgctttccaggtccttccagcttacatttcctttccccattttcatctcatcaaagaaaattattctctaaagaacacctaaaatgttatctttatagtgatatctcttactattttttttaggcttatcaagtctgacaagatttcccccccacttttatggtacattttaatctttattttatctgaaccgtattgaactccacaacccagattttggtatgttcttttcaaggagttggtgaagcttatgtgaaatcatggatacaaaattttttttattcctttagttcccatagagacatgttggtaactataattgataatctaattaaccaatttgctaaagaactgcactatttcttcagtggcatctctgcttggaagtcctattcttagtctcagcttcagtacaccctcaagctatcttatttgcttctaaaaatctcttctagtacttctgtttcagtctttgtatagttcctatctgttctgtggatattaattatgtatagtcacgtatatatactgtgcagacttatttagaggctttttgtcatattttgcttaaacctgctactgtgcaatcttacattccagttctttcattagtatggtctttttttttcctttctcctctcttctacacttctattctacttttccttcttggtccctttgcgtagcatcttttgcctggccatctcagttttatcttttaagtcctttttctttgttcatcccctgcttcagtgagcttttgcttctctgaactttgataacaagtattactgaaccatttatttctgggtgtagaattcatccaaactgagcttttgagggaaccttattggttatctaattcattctcctggccagtacagctgtcattctctgaaacatccatgacagtatctacttgaatgtttaatggacatctcaaatgtaacgtcagagactgaattccagaccttcctccagttgtctgttcttctcatagtcttcagtgacaactccattcttctgcttgctcaaatggaaagtctcaggatcatctttgactactgtttttgttttgtatccacatccagtttgccagaaaatcctttttggctccaccttcctaatatgtcctgggataatagcagggtgaggaagtcaggtaattcctttccacagaaatcaagaataaaacaacatgaaattattaaaaacaccatttaaaagcattagaaaatgaccaggtaggcaactaggagatctttcgttgatgaaaagctgctactgtagctggtaaaaacaggtactttttctttacaggtaaaaacaggtgacattcttgcatgggcagtaaaacctgcagcttttcttgaaggaagtattcttcagtgcacagatgtgtttaggtttaatgtagcttcatttgtctatttttgcctttgttgcctgtgcttttggtgtcaagtccaattggagatgagcagagcctcagacacctgtgggacaatatcaaacatctagcagacatgtaataagcatcccagaagatgagaagaggaagagaaaaaggtagaaaaaattatttgaagaaataactgctaaaaactttcccatgtttggtgaaaaacattaacagatccaagaggttcaacaaaccttcagtagaataagcatacacaaacacaaaaccatgcctagctacatcatagtcaaactgccgaaagacaaagataaaaagaaaatctggaaggaagcaagagaaaaattacacatcacaaacaggggaacaatacagttagtgacttaattctcttaataaacagcaaagactaaaagacattggagtgacatatttaaagtcatagggagaaatctcaaacaatacttttatagtcagtgaaactgttctttcaaagtaaaggcaaaatgaaaacatttctagataaacagatactgaatttgttgatagcagacctgcacttatatggaatgctaacagagctccttcggggtgaagataaatgactccagaaataatctggatccaaagaaagggatgaaagcacttggaaaatatgtgggttatattttcccctgtcttcttttaatttatttaaacaaatatgactaaagaaaaatagaaatactgttgtggcctttataacatatatagatgagctatgtatatataaaaccatagcacaaagaagagggctggcaagtagaactgtaatggtatgaagttcttaaaatattttcctggatataagtcaatattaacttgaagtagattatgataaattaaaagatgagataagatttagataagttaaacagcaggcaataaatagcctaaggattaggggaactaaaatggtatactaaaatttgctgaacacaaaaggcagtgcaggaacaacagaggaccaatagagatgggacaaatagaaagctagtagcaaaatggcagacctaaccctggtcatgacaatacttaggttacacgagaagcaactaaacagtcaaaaagcatacattgtcagactgaatataaaaagcaagttccaacttgcttttggtatgttagagacacactttaaattcagtcacaggaaggttgatagtaaaaatattaaaaaacatacactgtgcaaactgtccacagaaaatatgtgcagttgattctatattagacaaaatagattgtcaaaaagaaatattgctagaggcaaattaaggacttttcatatggataagagttaatattgacataagataacagttacaaatgtatatgctcccaacagctgagctctaaaatacatgaaatccaacattcagaattaaaaggagaaataaacaaatctatgattatagttcaggattcagtactccttgcagtaattgagggaataagtagttagaaaataataaggatatttagaagccttttaaaagctgggtgtggtggcttatgcctgtaatcccaggacttcgggaagatgaggcaggtggatcccttgactccaggagttttaagaccaacctaggcaacatgacaaaaccccatctctacaaagaatagaaaaaattagttgggcatggtgacttaagcctgtagtcccagctacttgagaggctgaggtgggaggattgcttgatcccgggagattgaggctgcagtgagctgtgatcgtgccactgcatgtcagcctgggtgacagagcaagactttgtctcaaaagaaaacaaaaacgaaacacgccaaaaaacgcggtcagtcaacttgacctaattaacaattatattcttttatattatatatataatattataacaaaaattatattcttttcaagaaaacatggaatactcaccagaataaacaatatgttcaataaatttggaagtgttaggcaaggcacagtggtacacacctgttatctcagctacctggcaggctgaggcaggaggattgcttgagcccaggagtttgagaccagcctgggcaacataaggagaccctggctttacaaaaacaatttaaaaatttagctgggcattgtgatgcatttctgtagtcccagctacttaggaggctgaggtgggaagactgcttgagccttggaggtggagactgtagtgagccgtgattgcaccactgcagtccaggctgggtgacagagcgagatcactgtctcaaacaaaaaaagcatttcctgacacagaattaaattaaaaatcagtaacagaaatttagggaatgtccaaatatttagaaattaagcaacatactttttttttggcggggaaggggtgtatataacattagttaaagcctttaataattttaaaataagaactttaactttttttttattatactttaagttttagggtacatgtgcacaacgtgcaggtttgttacatatgtatacgtgtgccatgttggtgtgctgcacccaataactcgtcatttacattaggtgtatctcctaatgctatccctcccccctcccccccaccccacagtgggtcccggtgtgtgatgttccccttcctgtgtccatgtattctcattgttcagttcccatctatgagtgagaacatgtggtgtttggttttttgtctttgcgatagtttgctgagaatgatggtttccagcttcatccatgtccctacaaaggacatgaactcatcatttttttatggctgcatagtattccatggtgtatatgtgccacattttcttaatccagtctatcattgttggacatttgggttggttctaagtcttttaagcaacatacttctaaacctgtgaatcgaataaatttcaaaggaaattagaagattttaaaatggaagaaaatgaagccactgcatatcaaaatttgtgggatgcagctgaagcagtgtcttgttggaagtttatgtcattaaatgcttatatttgaaaaaggaaaatcagtgacttaagtttccaccttcagaagctagcaaataatagcaaattaaatccaaagtaaatgaaaggaaggaaataataaggatcaggtgcaaatcaaggaaatttgaaaaggagaaacaatagtgaaaacatgaataaactcaaaagctgtttctttgaaaaacatcaataaaattgacaaaattttagccagactgatgaagaaaaaagaagatacaaattaccaatatcaagtacaaaagaggaaacatctctgcatatgtcacggatcttgaaaggataagggaatattgtgaacaactttatgccatcaagtttgataacattaaatggagaaattccttgtagagaaggagtggaacagactcaagaagaaatagaaaaattgtagcccactatgaggacaagaaattgaattagtgtttgaaattcttcctaccaagaagcgctcaggcccagatgatctcactgatgagttttatcaaacatgtagcgaagaaatactgcctgttctacacagtgttgttcagttagcaaagaagtaacacttgtcagctcattttatgaggctagtattgcccagataccaaagtcaaaggcattcacagaagggaaactgcagaccagtatcccttataaatagacacaaaaatccttaacaaaacattaacagattaaatcctgcagtatgtaaaaaggaaaatatatctatgtgaggtttatttcgggaatgtaaaacccgtttaacatccaacagttggttaatgtaagataggtctcaaatccagtcacttctttctcagtaccgctactgtcctgctcaaagctatccccgttctctcttgaattgttccttagcctcatttagtctgttttcaacacagcgtccaaacttactttaaacatctaagtaagattatgtcccttagcttacagccctctctttttccatatcccacaaaatgctagcctaagtcctcacaagaacgtgtcaggccttattcattctggctgtttttcaggcattgcacctgagttgattatcccctcattgtgtctgaaatcagtttgttttccccgtcttggtgcagtttgtattttgtgttcttcctacttttctggggcccgatagaattggaagtggtatcacttgatggcttaggtggctatgtatctttgttagggtatctagactctgttctgttctgggttggtatgtgacttgccctagtgattttgctacttggttaatctcatacccatgcccatggaaaaataccgtcagtctttgtactgtctcactcaattcctggcatactatggaactttcactgcagaaagggacagagatgaggggtgggtgtgggtgggggactttgatctctttcctctgatttatccttttctccctcattacactttctttccctctgtcatcagaaaaggataacgatgtggcttcttttctccctgttactcgtgaatcgtaatatatttgtcagctcacctgtgtagctcctgggtgatggggtcagtttaggagtgagctgttacgcctctctgttgtgctccagaatgttttgtttctttacctgatggctgagttccaaattgtatcagattatgtttctttccttgtttggatgtcctgggtgaaaaaattttttttcaactgattaattcccattttatctccctcaatttgttggttattgggcaaggtaaattcagaggtgcagcttctgttggctttttttactcagaaaccttacttagttgcagtttacttacagtggctcacacctgtaatcctagcactttgggaggccaaggtggatagatcccttgaggtcaggagttcaagaccagcctggccaacatggcaaaaccttttttctactaaaaatacaaaattagacaggcgtggttgtgagtgcctgtaatcccagctactcaggagactgaggcacgagaatcgcttgaacgtggggggtggaggttatatcgagctgagattgcgccactacacaccagcaagcctgggtgacagagcgagaacctggctaaaaaaaaaaaaaaaaaaacaaaaaaaaaaagttagttccttatttgcctgtttgtctcacactgcgtgatgaacctgttagctcacaaagtgctgatattgcttacatagatacacaaacacatttatacgatatattcatgcaaatgaaatgtatgtacatatacgtgtcaagtatttgaacatatctatttatgtatttttttcttaagtaatgtgttgaacagggagctagcatgtactttttatttcccgtagtgcgtatcattagatataatgtatagtaactttgcgctgcatgtttctaaattaattaaagcaaagatgtgtatttatttggctctcaaagcattgttccaataatagagtagaaaaataaatgttaaattgggtttattttttactgagattcttttctttctttatctgtaatacaggtacatcaagagagtgtacacatgattgaagtcacaagtaatttgattaatgaaactctagcaaatcaccctgagtgggcaaagtaagaatattgttttgaaaaagaagagagatgaatggcctagtttcagcatctgtttgcacgaaatgaccttcattgatgcagctgcattggaagataaaagatagggtttgccagagctttgataaatattgtcatttttgaagaagaatgtcatgtaatacagagggtgggaggaaagtgctcaggattttaggtacaattcatggtaaatgatactttgttttataattgaggtttacagcatgtttataatttacaaagcacttcatctgtcttatgtcatttgttcctcacagtgactgtgtgagatagattgaagaaattatccccattttacacatgaggaaacaagatcaaaggttaaggaacttgagataataattccgcagtggcagagtcatttataaccactgcttctgatcaactgaaggaaagtttccactataacatggaaactgtaactcctcaactttctatataatttttaaatttatgttatttatttatttttaagaaatgaggtctcaccatgttgtccaggctgatcttgaactcctgggctcaagcagttctcctgctttagcctctggagtagctgagactacaggtgtacaccaccatgcccagttttataattattgacatattcccatattgtattatttttgaggaaggataggtgaactatggcccagggccaaattcagccacctccttttgtgttggggaccagcctcaacaccacccgtagggtacctgaagttcggtggcgacaaaggaatgagaagagacaggtacaggttaagagttcatgaaggtgggagtcggggccagttgcataatggaggctgcaaaaggcgctgagctctggtctccacactgtttattgagtgtaatcacttagatctaaaaagcagatgttcagggtgaaaacactgaaagggaggcagtacatcataggtgtaatctatagcaatagcggtttaaatcaatctcctttgtgctcaaacagcatatctttaacttgttggagagtagctagtgggagcgggcttaactaggagcctgcacatctgtccacattccagtgtttcaagggagtgtctttctccttgaacacagtgtttacagataagagagcaggtcttgctctgagtatgggaacatgatggcaattcggagacttttctactcagaggcctctcatggctttccacaacttattgtcccatatttttgtggccagtttatacaggcaccccacaagcccttttcccaacactttggtaaatgaagttttagtggaacatacctatgtctactcattgacatattttctctggctgttttggggcttcaaggacaaacagaattgagtagctgtggcagagattatatgttctgcagagcctaaaatacttactctctagtcctttacagaaaaatttgccaacttctgttttataggatctctgtgtaatttggcttctggaagaagggttttcagtttttgtgggggatgttcagcagagctgtgttatccacctaacaacttgatgacacattgtatgacctgccttttattaacctcaagacagtcataagtcaggaaatattctgccagttttaggcttataagttgagatttaagttgatttttttcctttgcctctactttattcttttatataaaacctgcctaggacattacttgaacttgatttagaataaaattttttttttttttttgagacagggtcttgctctgtcacccaggctagattaaagtggcacaatcatgtctcactgaaggcttgatctcctgggctcaatcattcctcccactttagtctcctgagtagctgggactacaggcatgagccactatactcggctaatttttatattttttgtaggagtttcaccatgttgcctaggctggtcttgaacacctgggctcaagtgatcttccctcctcagcctcccgaagtgctgggattacaggcatgagccactgtgcctggcctatttgaatcttcataaaagaagtatatttcttttgaaatataaattgtggtatatttatgcagtggaatattatacagcattaaaaaaaatggactaatgatacatgtaccaacatggatgactctcaaaataagtatgttggccaggtgcggtgggtcgtcacgcctgtaatcccagcactttgggaggccgaggcgggaggatcacctgaggtcaggagtttgagaccagcctggccaatatggtgaaaccccatctctactaaaaatacaaaaatgaactgggtgtgtggcacacacctgtaatcccaggtacttgggaggctgaggcacatgaatcgcttgaactcgggagacggaggttgcagtgagccaagattgcaccactgcactccggcctggatgatagggtaagactatgtctcaaaaaaacaacaataaaaaagtaagttgagtgaaaaaattcagacaaaaagcccaaatggtacgatttcatttatttaaagttctaggaaatgcagactaatctgtagtgacagtaagattaatggttgcctgtggattggggtggagctctagggaggacatacatataggtgcaaggaaatttttaggagtgatagatatgtttattattttgattaaggatataagtagagaagtagaatcatcatatttcattctagaacaggcttttcagctgctttgtggagaaaagattgaaggtatacaagatgtaaacctttgagacaaattaaaagcttctagagtaaaccagatgagaagtgacaaagccctgaactgtagacagtttcagtggaggtgaacaggagggacagatttataaggtcttaagggggttagttggtgattaattggatataggaggaagaaatctagcatgacttatgtttctagctttggaaattagtgagtgatggtggattcaccaagacaggaaatagaagagcagatttggtagggaaactaattcccctgtttacctgttgagtttgaggtgactgttgtaagtagaggcatccagtaggctgttgactatgtaggtatgcggttcaggagagatggggtgaagttaaaaaatgggcagttgctgtgtaagtccaggaatcagatgagaggtctgggttggatcttgagttttgagaagcatcagcataaagaatgtatgtaaggtacagagaggatgtctggaggtgcgccctgtggatatcttaagcctttaagggtgagcaaaaaacaataggttcacaaaggaaaatgagaatgggctatgagaaaggtaagaggaaaaccaaggaaagagaacgttttgagacagtagtagtggtcagcaatgtcaaattgctgcagaaattttctaagagtgaaattgggtttagcagctgcaagagcagttcatttaattggtgtagcagaagcccattagattgcagtgtgatgagaaattattgggaacgaggaactagagaaagcaggtatagactgctctttcccaagtttgcctatggaacgtagctgggaaggaggtatagagcagttttgtttaattttttaagatggagaagccttgtttgtatgctccagggaaagaactggtagagtggaaggggttgtaaatattaggagagagataattcttagtgcatttctctgaggatgaagcatgagatgaatccatggcacgaatggaacagctggggaaagcaggtcagaatggatatggatataaatactgtgagttcagtggagcggggaaggcgggaaattaggggccatacatctttgaagtaagaagtgaggtcttctgtcctctggctctttggatataatacattttaaaaggagaatgggaaaaaggaggaaccaacatgtatcaggtatgggattttaggaaggagccacctgggatctaggcaagtggatagagcctttcataggatgatagaccttccaaatgttgtcctctagggctcagcctcagccctcacatccagagggctccttttctttgggtcattcttctgtactggaagtcaatgcagagcccttttgtaccggttttgaatagtagcagcattctctctgcaactgtatcaaaggcacacaatctgagcagccccagatcaggtagtagaagaaaggtttgtcttttgtttgaaattttgaagtaataattatagattcacagggagttgcaaagacatatacagggaagacccatatactcttcaccccatcccctccagtgttgtcatcttgcataactatagtacaataaaaccaggaaattggcattgctataatacactgaccttcagatttcatcctctatgtagcttcatgtcagctatcaacacactcagtacataactgttacattgcaggcttcctcatgccaccccttaacagccacacccatcctctaccctttccttcaatatttccctaactcttagcaaccactgatcagttctccatagctataaaatcattttgagaataatacgtaaatccagtcatggagcatgcagccttttgagattggctttttgttgcttagcataattctcttgaagctcatccaagatgttgtaggtatcaagtttgttcttttttattgccaattaatgttccatttaggaaggtttttgtttttgtttttgttttgacacagagtctcactctaacccaggctggagtgcagtggtgtgatcttggctcagtgcaaccttcacctcctgggttcaagcgattcctgtgcctcccaagtagccggaattacagtcatgtacgcactaccatgcctggctaagttttttgtttttagtaagagagggttttaccatgttggccaggctggtctttgaactcctgacctcaagtgatccacccgctttggcctcccaaaaggaaggccttttttttttttttttgagatggtgtcttgctctgtcgcccaggctggagtgcagtggcgcgatcttggctcaatgcaagctccgtctcccaggtgcacgccattctcctgcctcagcctcccgagtagctgggactacaggcacctgccaccacgcccggctaatttttttttgtatttttagtagagatagggtttcaccgtgttagccaggatggtctcgatctcctgatgtcatgatccacctgcctcggcctaccaaagtgctgggattacagacttgagtgaccgcgtccggccaaggaaggctttttgaagttgcttagactttggtgattcatagaaggtctgattctttttcagcagataggtggggatgggattggaaatagtaggggtcggcatgaaataatgataatggtttcctgcatctctcagtactcagtggattctgtcagcaggagggcagttgaccttgtaggggattcatgtagatactcctagtggagaagatacagttaagaataagtccagatgtcctttcttccaacttggtgtggttttatatggcccatgtagtcccttgacttctgctggatgtgcctcgtaagctggtgggtaaattagacagattaggatcatcttagtggagctctaaagaaaataatgatgttatacatactgattcttgtcttcggcagttgttagtcgggagctcattttctgctttctcctgacttgtctcaagcctgttgattcctgtgcctcaggaccctcattaggagatggcactgaaatggttctcagttgcacttatcccttcgcttacttgggagaaacccagtaggctaaactaagttgtttttaatcagggttgttctcttggtaggtagtaggtgatagagattaacctttacccaggaaggtgaaggcagaccagtctaaactgtagggcattggtttctgctgagggatccctcttgagtgagtaggggagttagtgataggctgaggcagtgaatctccaaggaaggagctcagttcaggggctgtagaggtgtaaggccggagtacagcccagctaaggcagctcctgtgtttctggccccatgtctcttgagggaggctgggactgagccagtacctctaccttgtccccaaaacagctcctctcatttgttgctcttaggaaacctgtgtgagtacattgggaaagtgttttcatagtggccaataagacgttttcccaggcccaatagacatttgtgaatcattaaggatctgtccagatacctctatgaatcttcacacttttttttttttttttttgagatggagtcttgcccttgccgcccaggctggaatgcaatggcatgatctcggctcactgcaacctctgcctcctgggttcaagcaattgtccttcctcagcctcccaagtagctgggactacaggcgcacaccaacacacctggctaattttttcatttttagtagagacggggtttcaccatgttggccaggctggtcacaaactactgacctcaggtgatccacccgcctcggcctctcaaagtgctgggattacaggcgtgagccaccatgccctgcccatcttcacacttttgaataacactacaggagagtgttatcattataatatataatatcaatataataccaatatatcaatataatatcaattataagttaccatataattgaaaatatttagcagtcccttcaagccactgatgaatgtataaaagagtaatttaaaagctacttaatttctcccgaatcacatttcagtttagtgacccagatttcctgtttatatgcttatactgtaaattattatatttgtgtctctaaacgtttgaaattttgtcttacttgctgagaaatttttttttttttttttttttttttttgagacagtcttgctcttttgcccaggctggagggtagtggtatgatcttggctcattgcaacgtctgcctcctgggctcaagtgattcctgtgcctcaggctcctgagtagctgggactacagttttgtgcaaccatgcccagctaatttttgtattttttagtagagacggggttttgccttgttggccaggctggtcttgaactcttggcctcaagtaatctgcctgccttggcctcccaaagtgctgggattacaggcatgagccagcgtgctggccttgctgagaaatgtttgagtggactgaggcatttgccaagaagtttcacagatactttatttggagtgtgggacaaactggttaatacttaagattcaacccactactggtttaatagtctactttttaatttattcaaaagatctcttatttttttctggttaaagaccactttcctaggcaccatgactttgtggctgtcagtggcaactgactttctctttatgaccatctttctcatacacagcacataaagttgctgtgagttgaggatgttgcacatttgactttacctaattgacccttttgtgttaggtttgtaggatgtgtcattttggggcctcaggaaagtaaatgactagcttctgcttgccttcaccttttggcttcactctggaatagttgaaatgaggactgttaaatttgtgaatgtcaacatctccagcgtatattattaagaggaacaatttagataatacgtgaacatattttctcttgtggaaaacattaggattgtgtaaaggattcttgattaaggtgtatggtacagcctgcttagtcaacagaagaatgaggaggccacctctcactgcacaacaagtaaagctgtgggctatagttccttgcatagttggaactttgctcaggaattctatctttaaaagatcttcagtagataaccaacttgaggataatgattcaccttcttcatttcctgcattctttctgatttcttcacttccttagattagtgattctcaaactgtagcatgccatcagtatcacctgcagggtttgttaaggtacagattgctgggccctagtcgtgttcctttttcagtagatctaggtttgggcccccaatttttcatttctaacaggtttccaaaaagttctgatgctgctggtttgtggaccacactttgagaaccctgtcccagatgttgaatatcccagtctcccagaaccattttctttggtgctgaataaggcaggtgactcaggacatgtgaacagagaaaccaggcagagtagaatgaaagggaggttgtggggaaagtgggtctaaaagctaaggaaacattgaggcctggtgccatggctcatgcctgtaatcccagaactttgggaggctgaggcaggtggatcacttgagatcaggagtttgagaccagtctgactaacatggtgaaaccctatctctactaaaatacaaaattagccaggcgtggtgacgtgcctatgatctcagctacttgggaggctgaggcaggagaatcacttgaacccaggaggtggaagtcgcagggttgcaccgagccgagatcgtgccattgcactccagcctgggcaagaagagtgaaactccatctcaaaaataaaataaaataaataaaagctaaggaaagattgaaaggacatcctgaatgttagagacttaggacagttaagcctggaagtcctgctcatgatgctttggtatctgtgtattggtgaatgatcaacagtctgtctgttatggattaagcatatcaagttcaaagcattattggtacactacacagaaagtgtacttttttcatttttttctttgttttacattagttggcttcctgaggctcaggtagtccaaagagccctgaattctgcggctaacaacgtgtatcagtatggacgagaatggataactcacaaggtaagggaagaaactttctttgtggctttctcttttcagggtctttactggtggttgcttgttgctttgataaaacataagtagaaatgctattcacagcagtaaataggcttaaataaacaggtaagcaacatacaatgaaatcttttgaaagatcacattgaataggggtagtaccctgaacaatctgagaggttggtcatgtactttttcaagatagatgtgattcattacttgtgagttaggacagaatgatcacttggtttgggtagtcaaataaggctttgtagagaaaaaggtattaatgcatattaaatcttattgtctgctgataactgtctttggcagtttccagttattttcatttaatatttgtttttttttcttttactgtttctaagaagcctgcagtatgaattattttgcctgctttgcagatgaggaaacaagactcagcaaggctgagtcagttcccagtggtcgtgtagtaaattgcagagcttggtttgaaactgaagcttaacttcaaatcctttgtttctactgtagcatgctcgcagtgtgtgcccagaactggattaagtgcttttgatgtggcacttgagataaaccttgaaggaatggcagatcaaggaagagtggattttaagaagggtatttgtgtgagccaagatgcagagacaggagtgtgcttgaagagatgattgagatgctgagacaggagtgtgcttgaggaaatgatcttgactgaagtggagggagctttgtgaaggggaaatgaatgatagaggaaaggcagcacagttaaggattagattccaccatatggatttgggatattctttccctccctagttttgcctgtaggaataaaggtaatttgcacttttagtatactgaaataattaggattatgtaagaatcgacaggatttgttgcagtaagacttgtgcctagaaaaatatattagtatgtgattccatattgaaaattcaaaaacaaaatctaaaaaaataatataatggaagatacgctgtatacacatatatggaatcaggctggccgtggtggctcacgcctataatccaagcactttgggaggccaaggcaggcggcggatcatggggtcaagagttcgagaccagcctgaccaacatggtgaaacctggtctctactaaaaatacaaaagttagccaggcgtggttgcgcacgcctgtaatccgagctactcaggaggctgaggcaggagaatcacttgaactcgggaggcagaggttgcagtgagccgagatcatgccactgcactctactctcagagacggagaaactccatctcaaaaaaaagaaaaaaaaattagatgagcttgtttacctcaaattagatggctctcaaatgatgttctgactatgcttcatgcttggttgcctctcatatgcagaggcatatcaggcaccaccaacagtacttgtgtttcagtgatgtgtagttttttttttctttttgtggagagggagtcttgctctgttgcccaggctggagtgcagtggcgtgatctcagctcactgcaacttccacctcctaggctcaagtgatcctaccacttcagcctcctgagtagctggaactacaggcatgcaccaccatgccctgccaatttttctgtttttatagagacgtggtttcaccatgttgcccaggctggtctcgaactcctgtgcttacgcaatccttccaccatggcctcccaaagtgctatgattacaaggcatgagccacgatgcctggccaaatggctttattatattgaatatttagttttcagtttatgaataaatcaaatataaaggaacaaatatgaacagatacgtttgcattgaatatgtctagtaactggttcacatatctgtaaggccagcatcaaataggcaaagagtaaggaaatagatgttgtaaactaacgtgggaaaatggtcactcctttcattaataaagaagaaaataataaataatggctacatttcacacctgttaaattccctaaaaattttccagttagttcataaggctttgaggaaattgggtcatttatgtaattttagaaagcattaattggtatatttcttattatagaagtcagtttaccaatgcatagcaagagccattaaaatgctcattttcggctgggtgtggtggctcatgcctgtaatcccagcactttgggaggccgagtcaggaggatcacttgagcccagaccagcttgggcaacatagtgagaccttgtctctacaaaaaataagaaaattagctctgtctggtgtcagtgcgcctgtgatcccagctacttggctgtcttaggtggcaggatcgcttgagtctgggaggtccaggcttcagtgagccatgatcatgccactgcactccggcctgggtgacagagtgagaccctgtctcaaaaaaaacaaaacaaaaactcattttatttggttgcagtacatttatttatgtcacaagtaaccctgcaatgaacatccatatatatccttaaaaactatgtaaaaggatgttcattgcagtgttactcatgacactaaaaattaggattcatgggtgggcgtggtggctcatgcctgtaatcccagcacttgtggaggctgaggtgggcagatcacttgaggttaggagttcaagaccagcctggccaacatggtgaaaccccatctctactaaaaatacaaaaattaactgggtgtgggggcgcacacctgtaatcccagctactcaggaggctgagacaggagaattgctcgaacctgggaggcagaggttgcaatgagagtcgagatcgcgccactgcacttcagcctgggtgacagagcaagactctatctcaaaaaaaaagaaggatttattgtatatccttagagtgggtaatgatcagctaataccagaacgtaatgaattaatataaaagtattaaagatgaaggttagtgatgaaggctaaagattgaatgtttataatgaagtagaaaaaattctaaattgtctctatgtaaataggcagaaagttgcagaggaaatagaaaaatggaaacaattgtattaaggaagtgggcctacaaacttctagaaattctttgggtttttgtttttttttctgagaccaggtcttactctgttactcaggctggagcatgttggcgtgatcacggctcactgcagcctcaacctcctggactcaggtgatcctctcatctcagtctcctgagtagctgggactgcaggcatgcgccaccacacttggtaatttttttgtatttttgtaaagatggggtttcgccatgttgctcaggctgatctcaaactcctgggttcaagcgatctgcccacctcagcctctgaaagtgtgaaaattgttttttatattataatatggttttaataataactaagtgggacaacattttataatgatagccttcctctaagttacgttgtctcagtgtacttgatttccacaaacccggggccagtctgatcaattgtaaatgagaccggacatctctcagcatgcaaatagaggaaggattcgtgtttatagccaacatcctaaaattttacttaaaattctgtggtaattcttaataatagagataaatgtaacatgagacatatgtataatggaaggtcactgggattacaggggaaagatttttctctggacaggtaagatcagataagtcagcaatcatggcttcatttgcaccattctctgatagcgtgaggtagctctcttagagacctaagaatagagcaaagaaaatagaagcaaaaacatgagaaaggaaatttactgggaatactcaggagtagatttaaggaaagaacgtaatatggctagagataaatagtctggaacatttttgtttgctttggaacaaatgtaaatacccagcatatattaattttactctgttgttgcctgaaatattgtaccacgtcgtatctgtgtttttttctagctccataaaattctaggagataaggtgaacaatactgctgtaattgaaaagcaagtactagaactttgggacagactgtatcactcttggtttgtaaaggtaagttattttagctaaagtttcctgttgtaaactaataaagtccttttattgactcatcaactagataggattatattcacagtgggatttcattcatggaaatttcaaaacagcaaaaccttaagcctcaggtcactaaaagtcagtgtgagttgatggttagtctccatggcagaacctgcctatctctctggtgcgtcagtattccatcctcagtctgttgtcacggacatctcatcccctagactagctctgtgcgggagaagtgtaatgcaagccacataaggtaatgttaaattttctaatacttatactaaacgaattttacctgttttagttttttagtgatattttatttaacccaatatgccccaaatactattattttaatatataatcattagaaaaaatttaataagatattttatatcattttttttccatatgtctttgaaatctagcatgcattttataccagcagcacatctcagtttttgagctagccatattttaagtgctcagtagccacatgtggctagctcctactggctactgttttagacagtacaactgtaggcattaataacttttctttgagaaagtgaaactgaatctaaacgcttagagatcttttattttttattattatttatttatttattttttgagacagggtctcgctctgtcacccagactggagtgcagtggtgtgatcttggcttactataacatactccgtctcttgggctcgagtgatcctcctgcctcagcctcctgagtagctgggattacaggtgcatgccaccatgcctggtgaatttttttgtattttttgtagagacagggttttgccatgttgtccagaccatcctatacactggatctggcagggcctgtgggctagcaggagccgtgctgtgtatagagtggatagagttggtggtgatgattctcagagttcatgtaaggagagcaagtatatatgtaagtctcttaatgtagggtggagggggaggagggctgattttaaatttgaatttgttgcttagtgacttgtttgggattatgtactcttgctttgggatgagttgaaggaagattgttagtttttatagatttcaaagacttgggaaaaaatattcagggaatatctaggtgagtatcatagatttgatcccatctgctgaaaaaccagataattagaaaggtatatctatttcttttgctaactctggggcttctgcttacaaatagcttttattacccctcacacctcctgagctttattttatagtagaggaaggtcagtgtttcataagcataggtttgttaagtggttaagtacaattgtcccccagtatcatgggtgatcggtcctaagacacccctctggtaccaaaatccagggatgctccagttctttgtacaaaattggcatatttgttgtctgggcctggtggctcatgtctgtaatcctggctatttgggaggctgaagtgggaggatcacatgaggctgggagcttcagaccagcctgggcaacatagtgagaccccatctctacaaaaaattagctgggtgtggtggtgtgcgcctgtagtcctagctactcggggagactgaggcgggaggatcactgaagctcaggaattggaggctgcagtgagctatgactgcaccattgcactccagtgcagcctggtgacagggcaagcaagacgctgtctctaaaaaaagaagacaacattcctaccatcatgcttgtctaatttttaaatttttataaagataggatctcactatgttgcctgggttggtcttgaacggctaggctcaagtgatcctctcgcctcagcctcccaaagtggtaggattacagatgagagccattttacctggcccttatctctttcaaatttagttattctcatatctctgccaatgtcttccagatagataaattctatttactgccttacgtttgcttgttatattcttctgtcctcattttccttaccttgtatggtaaattaaaaagaaaaatgagggctgggcgtggtggctcacgcctgtaatcctagcactttgggaggctgaggcgggcggatcacgagatcaggagatcaagactatcctggctaacacagtgaaaccccgtctctactaaaaatacaaaaaaaaaattagccaggcgttgtggcaggcgcccgtagtcacagctactcgggaggctgaggcaggagaatggcatgaacctgggaggcggagtttgcagtgagccgaaatcgcaccactgcactctagcctgggtgatagagcaagaccccgtcccaaaaaaaaaaaaatgaggaaaggaggaaaaagcaaagatgggaaatcaagagaaaggtggagggcctaaaaactaaaaaaaaaaaaaaaaaaaagaaagtaaatgctgtttagtgtgttgtagatactgagaaataagatgtctttgcaaatgtatttaggagggaagcactggagcgagacttagacaaggtacctagaatataaacaaaagaattttatatttcaggtctttaaatggagttcgtagctgatttcttttttcttttttagacagagtcttgctctgtcacccaggctggagtgccgtggtacattcttggctcactgcaacctccgcctcctggattcaagcaattctcttgcctcagcctcctgagtagctgggattacaggcacgtgccaccacgcctggctaatttttgtatttttagtagagatggggtttcaccatgttggtcagggtggtctcaaactcctgaccttgtgatccacctgcctcggcctcccaaagtgctgggattacagacatgagccaccgcacccggccttagctgatttcttaaataatgcaaagttcttttccttggagtacttactgaagtgatgaaggggacctgaagcaaaatgtgacatttatactttctgttctttagattaagatgggaatttcatgtctgcactgttttattccatagaatgtaacacactctggaaggcacaaaggacagaagttgcatgtcagtcgtcagaatagctggctgggagacattctggactggcaggatattgtttcctttgttcacgagaacattgagacatttctttcggtaagaaatagcatttatagttaagctgaagttcaaaataaaaacaaactgtaattccaagttttcttcatacactttgaggcctcatctatcctgtttttaacatcatgacatttacatatttgagaactctaaatgcactaggatgatgttcaaaagccataggcttcaggtgtcactcccttggtatttcccctgtggttgtagagtaactgagagatgaccaggatgtctccagctggactactggagaggcacctgcctttgtgttgtgcgaagacccttgaccagatggaaatatggttccagttacattggagggatgggatgtgttgaatgcttagcttgtcaccttcccacctaacctcctaccatgcatcatcacctctgcagtctgcagcattcctaagtgctaactactgctcctcctcattccataccatattttgtatggtgtcttgcatgtagaatttcacagagggcagttttcttgtgcataaacttgtgactttcatcaagtgaacaaaaattgaggtttgccgtgctaaactttttaaaattaattaatttttttttgagacggagttcattctgttgcctaggctggagtgcagtagtgtgatctcagtttactgcaatttccacctcccgggttcaagcgattctcctacctcagcctcctaagtagctgggattacgggcgtgccccaccacacccagctaattttttttttttttttttttttttttgcatttttagtagatatggggtttctccatgttggcccaagctggtcttgaactcctgacctcaagtgatctgcctgcctcggcctcccaaagtgctgggattataggcatgagccatcacacctggcctaaatttaatttttatcaaagtaatacatgaccataactgaaaaggcagcaacgctaaaagattttaataaacagcagtgccctgctgtatgcctcccaatttcccatcttttctttacaaacaactgccaattcttttagctttccctgggtatttacctctgaatttctaaaataatgtttatgctactctctttgttttgcagttttagatgttatcttttggcttcctaatgtggaagatgaagtgctgttaatcagatattgggcctttaacatggattccttaattttgaaagcctcttttctgttttctgtctctttgttttctttttctcctgagaaatagcttcaacttgcctttgaaacagtgattgaggccgggcgtggtggcttatgcctgtaatcccagcactttgggaggccgaggcgggtggatcacctgaggttgggagtttgagatcagcctaaccaacatggagaaaccccgtctctactaaaaatacaaaattagctgggcatggtggcgcatgcctgtaatcccagatactcgggaggctgaggcaggagaatcgcttgaatctgggaggcggagggtgcggtgagctgagattgcgccactgagctccagcctgggtaacaagagcgaaactccatcttaaaaaaaaaaaaaagaaaaaaagaaaccgtgattgaaattttcatttctgctatcatacttgcaatatccaatagctcttttttctgaaccatccttttttacttatttgagaatattactaataaaatatttaaaatgacttctgctctctctttgctctgagtttctttaaagtttgttttgctttctcttttgttacctgtctggtgatccttggcagtgtgttcctttttaagagtgcaacactaaaagcagctggaaggtccctgccaggtcagcctgtagaaaagcccattagcaggttccacccagtatcctggaccttccagttggctctttaatgccagtgcatacacaaaatagtgtatcatctaataatacctttgaatgtttgctttccccaaaaattcaggtgtgttaactaaaagttattgaatccctttttgttttgttttgttttgtgactgtagtcgttgaacttaaaagtgtctgttattgatgaatgaagtgacagtgttgaatcatattaagatagatgataaagaaacatgattaaattttataaattcttacggaaagagaagaggcagtttttgaaactaaaataacagttttgccatgtaatccctcaaaaagaaaagtacaatttctgtatccctaaacacatttaaatattgagtaatgaacagttcagggaacagatgattagtagtttttgtatgaaatgttttgtgtcaaatattgtgctaggtgcttactaatttccaatttaattctcccagtgattctgcaaaagtagtatagttgccttcattttaataacaaaaaaacaggctcacaggtgttaaatagtttgcacggtaaataacagttgatattcaaagtcagttcatctttccttggctccagaggccagactttttatataatgttgtattatctttcaaactgtatttcatcctctagagaactcaacatttcttagtctcatacctttatatttttatttgctttgtcagtttttttttgttttttggatattgttgtaaataggtggcttagggccagtctcgttcatgaaatcttcccagtgtatttcagaatacattgaggtttctctacattcagactccttttgcatttattgttttcacccttttgatacctgaacatattttaccttctttttcaatttttgacactttagtgtttgtacccaatcttctggactagattgtaagtttttggaggtagaaggaatctcatatatcactaccttagaatttagtatggtgttaggtcctcaattaaactaattaagagaagcacattaggctgtagtgcagtagtttgactgtggcttactgcatccttgacctcctgggctcaagccatccttctgcttcatcctcctccttcttcctcctgagtagctgggactacaggcatacaccaccacacccagctgatttttaaattttttgcagagatggggtcttgctatgttgcacgggctggtcttgagctcctgagctcaagctgttctttcacctcggcctcccaaagtgctgggattacaggcatgagccaccatgcccagccaataattattgttgtatttagaaatacagtggctgtgttgaaatggcgttttgaggtcacgtgactcatgtcccttcctttaaagataagaaagattggaactagagaagatagcagagctcatgtggtccattgtctccaggctccctcccaagtctctgaggcagacagaggtggctcagttctgccaggagagacatttttccttatttagacctctgcattcctgcaatgtcctcttcctcctttgtttttctaaactgttgcgtttgaatctccttcaccggctccatagaaggtgggctgatggctcttagtaagtactgggaaacgaagttaataatcaaaaggttgtttggtgagtggtggactcagagtaaagggctgcagagccactggagatggtgaggccttgttggtcagttcttatccacagtagagaccaccgttcatgaccacattgcttagttggttcagtaagtctcttgggctttttgtatgtttcataatgaactctttgtgatgttcttccagtacttacattgctattgttgattaaactgataccaaacctggctcatgttttctacttctgagttaggatccttttttttccccctcagagagagagtctcgctttgtcatccagtctggagtacagtggcacgatcccagctcactgcaacctccacctcctgggttcaagaaatttttgtgcctcagcctcctgagtagttggaattacaggcatgcaccaccacattcagctaatttttttgtatgttagtagacatgggatttcaccatgttggccaggctggtctcaaactcctggcttcaactgatccgctcaccttggcctcccaaagtgctgagattacaggtgtgagccaccgcacccagcctgagttgggatacattttgtctccataaatgtgttttgttttcagagtttcatgggccttgctattgtgcctgcctttacccagtttctcctctttaagcctgacatataaattaaaccactttactttaaggatttagttaatattctagaaatgtttcttcctctattttctccagttgattccctttctttttttctttcaaataggaaaggttacttttttgttgttggagactaccaatctaaaattagtgtatttagttaatttcttaagaattaccacaagatattttctctcagtgcaacccagaaactatttaaatttttttttttaataaaaattccaaaatgactgaagctgcaaaaagaatgcttgtcaaatcacaagtaaaggcattgttggcttgtttcttggaactgatggcattgttcatttattctttatcccacgaggtcaaacagtcaatcttgcacatttttgtaggcattgtgaagcattttcaagattttatgtaaggagtttttgtaaatgaaaccagcctgccggagttctcttatgaaactgagctgaggtttgcaagaaatgccaagggcaacaaaatatgcctttataaatggtacatctgaagtaggaaaggaatggagaagacttttcatagaacagatggacatatgacaaaaaccagaactgctgttttgggaagggcaccaaaacaaaaatcagatgttgtgagttctgccccacaacatttaagctctaagctctagttccacttactagctttgtgcctttgggcaagttttctaaaaatttgtgagcttcaaattatgtatgtataaaatagagataatatcatctgcatttcttcgttcacagcattgttgggaggtctatggaagcattttagaaatggtaatgggaggtgtttttctggtcattttgtttttgtatttttcattaagaggaaggatagtccacttaggaagaatagaacagataatataataaggggatttgagatagtaaatgaaatgtgcaggtatgctataaatattgtacctctcctttattaatatttaacatctatgagaaaccttcctcatgatatctggttctagtgaatgtgtaggtgacaaatcagctgaactcagtagacgtcaatatactggtcattgcctgtctcaggaaagatttttggcctcagagcactgctcttgtccctgtctgttgattgcttttcttgtgatttaatgaagtcattgaggtgatgctttttatatttgtagatagctctaagttggaaatggcaagggtgggggctaggcagccagtaaagcaaatactggaatttcatggcctgcacttaggatcctacaagataaatataaccacaggttgtactctagcatattccccaggaggtaaagtcatggcctgtgtcacataataatgtctctgttaatgatgggccacaaaatgcaatcatggtcccataagattataatactgtatttttactgtaccttttagatgtttagatatacagatacctatattgtggttgcctgtggtattcagtacagtaacacgctacaaaggtttatagtttaggagtagtaggttgtatcttacagcctatatgtgtgctaggctttaccatttaggtttgtatcagtacactctatgacatttgcaggacgaaattgcctaatgacacatttctcagaatatatctccataattaagtgatgcatgactatattttttctctgcttgcgatttttacataatctacaatgatgtgtgtgtgtgtgtgtgtgtgtgtgtgtgtgtgtgtgtgtgtgtgttttgagacagagttttgctcttgctgcccaggctacagtgcaatggtaggatctcggctcactgcaacccctgcctcctgggttcaagcgattctcctccctcagcctcccaggtagctgggattacaagcatgtaccacaccacacttggctaattttgtatttttagtagagacagggttttactatgttggtcaggctggtctggaactcctgacctcaagtgatccacccgcctcagcctcccaaagtgctgggattacaggcatgagccaccatgccccaccaattatatataaaatgttttaatcctgttttttaaatttagcatttcattgtaaaatattttcccatgttataacagtgatgtttttaattgctgtctatattatttggtgtggatttactattttctttactattgagtatacaactgtttttggttgatttttctttttttttttaattttcatttgaaataatcctcagttcttagcttttcagttcatggtactaaaacactgtattaaaagcacactagatggctctagaaacttttttcatgaggattggttctgatatccagctttccttcctcgtcagatcttggagtctctgtggatcgttatgagccggaatgtgagcctgctgttcaccactgtcactacactcttgaccatcctcttctacagcgggacagcccttctcaattttgtactctctctggtacgtccacatagataagtacacatcatatttccttccctgttaaagcatatttctggtttcatttgcaattgcagatgtctgtcttcctatagtttccaaatacgatttttttaggagatgttgtcctttgttttgcagataattttcctgaccacactattttatctattaagttccagtgatgagtactacaagccagtgaagtgggtgataagcctgactccactatctcagccaggtccttcttctaatattattggccagtctgtggaagaagctatcaggtagggataaggtttatgctattcttatttctcccagaactttttttccatgataagcctgttttttgtcatgagcatcctgataacattcagtgctaaactcgtgatggactctggtattttcaaggttttcatctcattttgacaggataaatatgaacagtgcagttgttaataagaaaaagattcaggccaggtacagtggctcatgtctgtaattccagcaattgagattgcttgaggcaggaagattgcttgaggccaggagtctgagatcagcctggacaacatagtgagaccctgtctctataaaaaaattttaaaaattatctgggcttggtggcatgcacctgtaaccccagctacttgggaggctgaggccagaggcttgcttgaggaacttgaggttacagtgagctgtgatcacgccactgcgctccagccttggtgacagagcaagatcctgtttctttgttttttggagatggattgcagtggtgtgatcttggcttagtgcagtctctgcctccagagttcaagtgattctcctgctttagcctcccaagtagctgggattacaggcgtgcaccaccacacccagttaatttttgtatttttagtagagatgaggttttaccatgttggccaggctggtctcaaactcctaaccttaagtgatctgcctgcctcggcctcccaaaatactgggattacaggcataagccaccatgcccggccaagaccctgtttcttaaaaaacaaaaaaacagactgggcgcggtggctcacacctgtaatcccagcactttgggaggctgaggcaggaggattgttcgagctcaggaatttgacacaacctgggcagcatagcgagaccttgtctctactaaaaataaaaaagattagccaggcatggtggtgtgaaagctgtagtcccagctacttaagaggttgaggtggtaggattgcttgagcctggaagatggaggctgcagtgaacttggtcacaccactgcactgcagcctaggcaacagagtaagaccctatctcaaaaacaaaacaaaatttaacaattcaaagcagttttgataaccttctctcaaacctgagatttacaaagatgtaatggtctatctccatcagctttccatcagcaggatcttagactagctgttagcatcatgtcacttgcttaagagaacccccgcttccaccacccccatctccaacttctttcagaaccctctgctgtcaggagttttagctttgctccagaaggagagtaggtggacttcctgtttctcctctgtcctacagccaagctgtgccctctgcaaggagtaggttggatactggaaatgcagaatcgttgtttatctcttaagttataggctctgtatgcactggaggttctggccagaaactttttcgttatgacttctggcatccatgtatttacaggctttgtttctgaatgaacttcttcaacttttcctctgtataagctctttccaggtcgttggctcttggcttcctttatcttttcctcttcatcatttctggtagggaggacccttttgcagagcaggcctgtctcagcccctcctgtaatccctgtcatcattcctcattaacaagactcaactacatttttacttcttatgaatacgtctcaaattaaaccctcctattgtccattagagctcctttttctaatacgttgttaaccaggtggtcttaagcatctcttgaatagcgaatctttggctggcatttctgtctccacatacttttaataaatattgtctggaactagtcttccacagaaatcttgatttttttttttttctctgataattgcacctgattgatcttggtatattttttcactgtgttcatgtaatagctagggagaatcccatttgattgttagaaaaccttcagttacattcaaacaggatgcatgctcctaaaatacaatgtctgtagaacttttgctaagttctctccccttttcctactagcaaggcctgggtaagatcttcaccaataccttgtttccgcgattggctgtcaagtgggattaaaaaaaatgctcttaacacctgtatagtgtcctcaggtatccacacaggggccatctataaagattccagatttgggagtatattatccagtgtaacagcaattggggtgaagctgtttcgaaggaagtaccagctatagcttccctcctaagtcctatatgaccattgactatcatctttgctgaataaatgaaatgatgaaaattctagcaatagataatcttttgtttatctaggtgatatctttctgactcagaaaagcttttgcaaatgctctaccaaaaaggaaggctaatcttttatcttcccagtggggtaaagctatttattgtagcagccatatcaaaggctggtaggaattctccagtcagtgtggcttaagccaagctttgcagaaaaatatctaccttgttcataaagaacttcaagaaagatgatgcttccattttcctcaagtaatcttcattgttactgactcttattcttagaaaaatgtttctattttcacatcacagcttttgaattttctcttgttctgctttcttacagcagaccatcctctaaatgtctgtcaccttttttcataccaaatatgccaccttttttgttttaaacttaattcctagctgttgtgtttgccagtcagtggtaagtaaagctgttagtcacacctaggttcagctgattgaaagcacatactctgttacaccatgatgccttctttcaagaggagctggttagggaagatcatgacttatatttgtggacataagagggtggcatttagaaattcaggtctttggctcaggagagaatttgagattacaaagagtgctgtcatctacagcgatatgaggaaatcagtcttttacaaattagattcgacttcccttcttgggagtgcatacactaattatgtattataacagtagcttatgtcttggttccatagtatactggcatttaaaaaccatttgttttattatcaccttattttaaatacagaaaaaattttaacaacctttggtaccagaactataatctaatggttctcagaattgatagatttttatgagtctgataaatatggtacagactaaagaatgggttatggcctgagacatttttctaaccaaagctatatcaagttatgtaattttaaggctataattcaaggtgttttttttgcagtttaagttcctagggctgtttctttactggctcaaattcaagacttaaaatgtacagattttacagagattcctctgaagagctttctcctgtggagaagatggtagtgagttctctttctaagagctcctgttggatttttcatcctgaaggtttgtgttgaagaggcaatatgtttcttcatggaaaaagattttgagggaaaaataagtggttatttataatttatgaatgactatgaaaatattgtaatgtcctcaaagtgcagtttagcctacaaatatcagtgataccaacttttataagcatcagtcattaatcatcatctatgttgcagctaagtggaaatcattacattcatttatatgatctgtgaataagtcaaaaatggaattgaaattgggggttaattgcatgaccagacagtgatagtgtctgttcgtgaagctttgccttctgaagtatgtggtttctttatgatcactatctcattgaagttttgaaccttactcattattttgattctgaataagtattcttctcagttgaatacatttgcaattgggttttcatttcatgaagttttgagtcagtggcatgcatcctttatccccagaccattttcctctcttcagcagcatgttgtctcctgaatgtatacatcacacccttcttccctgatgctcccattctgcttgctctggtggagatattgcacattactaagttgcatgttgtcacggcctcaatgcaatttagtgtgtgtgatattttcacatgagtgcatgcacacgggtatggctcttgcttgctgggattacagcttttcagtgccagtgggtgggtgtcctgatgaattagataagacagtgtgtatgccatgcgattctcatttggaaagtgaacatgcttcccatcggtaccttccaattttggagaattaaaagtatttggattaaaaaaagtcagcaatgatcatttagtaaatcagtgtttccattttttactttgagcaaatgaaatatttattacaaattctcattgatttaagagtataaacaatatttaaatgtataaggaagaatgtaaagctgtaagaaaatgtattttcatttatttgaagaaatctctcccaacactggaatagagaagcagaaatctcttatgcatatttggggaaattaaattaactggagttcttaaataataatcaagacagtaaaggtatgcttaacctacctgatgaaagattcatctcataaacttaagtttccaaggtaaattaccttaaaaatgtgtcttttactttctcattgtgatgcttcgaaaactgctaaattcattttagtgggctaataatggaactagttttgaaatacacgtttactatttgcctatgtaattgaaacaaccccttgttatttttttagttagcattagagtaagcatccacaatcactaggcattgtcaaggacacaaaaccatgtattactgtatgaaaatattgaattaatatttactactaccatagcctccagatgatctattgtgatgctgtcattgtatgtttctgtgtttcaccactgttttggagggtgagaatggaagaattccacgtaagcagctcatcccctgtgcccttcagcagctcggccgttcccctcatgctggaaatctaatgtcagccaggttgctatatgacaccctgtggagctgggtttccagggcagattaatcaagaaagggaagatgtgacctctcaagggaggttggggctgggaaggggtgggtagagagagatttgttaaaggatacaaaaattacttagaaggcataagttctaatgttctacagcactgtagaatgactgtagttcaacaataaattatatcatttcaagtagctagaaggaagatacagaatgctcccaacaaaagaaatgaggccaggtacggtggctcacgcctcaaatcccagcactttgggaggccaaggcgggcagatcacctaaggtcaggagttcaagaccagcctggccaacatggagaaaccccatctccactaaaaatacaaaaattagctgggcttggtggcatgcacctgtagtcctagctactcgggaggctcaggtgggagaatctcttgaacccaggtggtggaggttgcagtgagctgtggtcatgccactgtactgcagcctgggcgacagtgagactctatctcaaaaaaaaaaaaaaaaaccaaaatgataaatgatcaagatgatggatatgccaattacccctatctgattactatacattatatgtattgaaacattattatgtaccccataaatatgtagagagcagtcaagggagctggcgagtacttttcccactggttattgtatatactgtgtctctaaaagctgactggtctctcccaccagctcactttctacttgagacataccatattgcagtgaggctagaatactgggaaggggaatgacagtcctttagaaaagagggtggaaccagtgtaaggaaatgtggaggaggcagaatttcactttggactcttcactcctccttttcttcattatttatcttcttccttagacaggtaattcttactcagctgtggtctaaggccctgtgtacactgagtttatagagcttctggactggtttgttattctccccatcccactccttgcttcaaatatcattccattaaaagcaggtcatctgattaaatcctgaattgtcttgttatttttttcttactcagtttagaaaagtagcaagcacaatctggtttgtcagaaaagagagggttgagagctaaagttaagtatcaggaaacgtgtgaaaaagtaagtttcatcctaggatttataaaggatgaagatcaagagctggttaggaagagttaacattgtaaacaatcatttgaagtcaattcaagcttctggtgcagaggagttattattaaatatagttgtgtaaaggaggcatggatattcacacctttagtgccatacggtataaatatacagtaggctttattaggggaaaatcctagctgagaaaaagctgatcctaactaactcttggaacttttattccacagagaggtatgcttaggtggggcatagctggattggatgcacgatggcctaccttccaatggacaggaatcctgctctgtaatagtctatatatagtatgggacaggagaacatctctaagactgtgtagtaatgggaggtctatgaatagggaataggccttgttagaaaaccgtgcctctagctcagtggctggtgtgtcagtctcttcttccattgagctaaatcacgtccatctgagctaccaaaaggagggaggaaaagaacctccagagtctgtgaatttgattctcatcaactattgagtgctaggagagcttggactaaaattaaagaacaactgtcaataatctttgaagaatcactgaagaaaaaggtcccagaaaaccaagaaaaggcagatattttttgagacataaaggtggaggaagcgtatatagtccataaatattagactggtaaacttgatgtaagtgttctgtcaatttctgcagtaggtgcttgaccacatggttgtgagcagttacaaagggaagggtaatgaccattggcaccatggatcacacagcacaagtcatacatggtcacctttagggaatgccagaagtccacgtctatcgtgatgtttgcaagagatttgatgaactgtatcataatgtctttcatagatagtaagacagggaagtgtttactgaaattgactatccaaaaaatgttgactaactggttttatttgactttgggagtaaattattcctagcaatctctgaattttaggttccaaagaaccctagagacgagtgataattatatgctcagtattataggttatttaaagtaaccgaaccaaaacttgcatatgcacagcacataacagtggttggcacgtagtgggttgtgtgtgcgtctgtagtcccagctacttgggaggctgaggcgggaggatcacttgagcctgggaggtggaggttgcaatgagccaggattgcaccactgcactctagcctgggcgacagattgacacccagtctcaaaaaaaaaaaaaaaaaaaaaaaattgtcagctatacctttatttatttttaatgaaagaagaaaagttaaaaaaaaagttcttataagagggaggaagttctggaattaatgatgatagttgcacaaattgtgcgcatactaaaaaccactgaattgtatacattaaaatgatggaatttatgttatatgagcttcatctcaataaaaaaattttattagaaaacaaaggcaggagagtcagaatgaaggagacatgtggacagaagcagagctcagagatggagagagattggaggatgccacactactagtctgaaagatggaagatggggccatgagccaaggaatgaaggcagcctttaaaaactggaaaaggctagtccaagtgtggtcgtatttacaactaaatgatcacaaccagttacagattgctctgttccctctctgctctcactgctttacttggctagcctaaaaaaaaaactactaaaaaagaagagaaaacagattctcctttaaatcctccaaaaagaatgtggcatccaggttttaggacttctgaattataagataaaaagtatgttttaagccaattgagtttagggtaatttattacagctgcaacaggaaactaacacaacccactacatgccaagtacagttatatgctgtgcacatgcaggtagcataccggaaagttttggtttggttattttaaattgtaaggttaaataacctataatactgggcatataattaccatttatctccagggttctttggaacctaaaattcagagattgctaggaataatttactcccaaagtcaaataaaactttatctggcatataactaatggcacgcactatgcctggctaattttttgtggttatagtagagacggggttttccctgttgcccaggttggtcttgaactcctgggctgtagcgatccacctgcttcggcctctgacagcgttaggattacaggtgtgaactaccgcaaccagccagacaacaaataaaaatgaatgctatatatttatagtttgtaataaaatgttacattgtgaaatggttaaatcaagctaattaatatattcattacttcacgtaccatttttgttgtgagaacatttaagaggtactcttagcagttttcaagtatacaatgcattattattaactgtagtcaccatgctgtacaatagatctactgaacttatgcatcctaactgaaactttgtaccctttgaccatctctcagcccctgggaggctgaggtgggaggatcacttgagcccaggaggtggaggttgcaatgagccaagattgcaccattgcactccagcctgggtgacagattgacacccagtctcaaaaaaaaaaaaaaaaaaaaaaaaaaaatttgtaggatggcaaccacatcctactctctacttctatgagttcaactcttacattccacatgcagtatttgtctatctgtgctgtgcctggcttatttaacttaccataatgtcctccaggatcatctacgttgtcgcaaatgacaggatttccttcttttgggggggctgaatagtatttccttgtgcacacaccacattttctactaatagccactgcttattgagcatctactgtgcactaggtcagttactaggtgcttcagatgcattgtcatttagcttttcatgggttgaattgttcttcctgccagcatccactcacatgaaactgtgaggtttaacctcataccttgaggagatatgtggtgaggtaggaggcagtggcttctgggttggtgtccgtggactattagttttttcggaattgagagattaaagctaatattagttataaagttaaatagataccgtatgacccagtatctccactcctaggtatttacagacgagaaatgaaagcatatgtccacaaagacttgtacacaaatgttcatagcagcattattcataatacccccaaactggaaacacctcaaatgcccatcagctggtgaatggataagcaagttgtagtagatctacataatggaatactactcagtagtaaaaaaggaaccaactactgatatactcaacaatgttggtgaagctcaaaagcattatgctaggtgaaagaaacaccaaaagctacacgacaacgtgaatgtacttagcactattgaactgcacactcaaaatgattcagatgctaaatattgtgccatggatattttgccacaatttaatacaaagctatataatgtatggttgtgtttacgtgaaattctagaaaaggcagaattatagtgacagcatatctagtggccatcagaggccagagtttagggagggtttgacaatagaagggcatgagggaactttttggggtgatggaaatattctacatcttgattgtaatgatggttatagaatgtatatatttgtgcacattactgaattgaatgcttcaaattggtgagttttattatttgtaaatcatagtttaataaagctgatataaaaaagaagaaaaagttgctaggaatttgagggagttaaattctgttttctggtaaattgtaagaggatttttctctgctgttttatttataaaacttgtgtgccagatcacaagtaatgaggtagaggggaatatattgtcttttcatccctcactaggttacatgaatatgtttagtaactgcaaacaatatacagtgcatttaaaagttgccttgagaacattaccagcaaccaatattctcagcagtgaaagaaagaagactgctgtcttctccacgtggtccttactggattgagccttggttacttgccacccagaggggtgattgagttgcagtattctgttgcacctttgatgtcaacttatttttggcttaaattttttaaataacataaggttaaagaaaggatcacatctctatcttttcctcattgacctccctagttctagacaaattctatacttttttcctttctttttctctgtggtcgattatgtcattattccctccccctcaaaacctaccttctcccttggtctccgggaatactgcactctagtgattttcctcctactacggaaatgatttcattacctctctggctggtatttctttgtctttaggtcctttatgaaaacacaacctgttgccctattttctctccacttgcccttttaagatgtcctgtactcttttataattattctggtgcgtctcagatgtcttgttctgaattttctattaagccttgtctcttatttcagctacctctagggtattttcatcatcctttttgagttcctgttgcccatactaaacaaactgcccttttcttgcatgcctcttccattctggccttctccatgactttgagacactgctattctttccccttcaggtttaaaacctgaagctctgttgttttctttttgctctgtcctctctgtttagttgttgagcagatccttggtattttctttggggtctttcgcttccttttggtatttttgataccactttattctgggttcttgttgcagagtcatatggctcctttaagacgttctctagtgaaagccattggtccggatgacaaagcaggttttacaattggggagccactctgcccctggatccatgtcccagaacactactaaatgactaaatcactagattacagggcttcactttgctcctaacagtatacctcttgggatgctttagaaaagcttggtgtttctttttgcatgtacaaggtcacgtttgccgctaacgtcttctttttcaactacagcttttcttctgtagtgaccatatgagggtgctttccctgcacccctctgcaccaccccatagagtccaggtttttatgattttgtgctgccttgagattacttacgggttgccacctttgtgctctctgaacagttccttatttcccctccttatagtgctgcactgccttactaatcttccaactgaaaaacacagagcacctgacattgcagattttcatgtattgaattcctatattagtcaccaaatatatgtgtctgtttttatctctcttgtattttcctctctgattttactttggagttaggaatattttttttcccacaaattctctcccaatgacctactttctttgatagcatttgtaagagatgttactttgtaggcttagttacatagtttaagaaacataggaagattttgttaaggcaaagaaagatggtgaaatacaagttacactatcccttattggctctttccaaaaggggaggactggccacagcctgggtttcttagagtttaaactgtattcttggaaacatgttattcacgcttaattttctttccatttgttttggtggtgaaatatctgcttcagagtgaaaagttgatgaattatttcagagaatagggtattttaaggtgtttcagttattttttcatcagaaatttaaggaatagtaaacatatttccaaataaaacatatttcatattacataaagaataacttagtaaatgtatttaaagtaaggtgtttatgtttctttgaaataaaatgaaaatagcattctcaggccagcagaaaaactgaagctattacatgatttggaatcaagtggtcacgtgatttttctgaatcacgatatgacactgtttatttactctttctttttatctttgggcattccagaggggtgtttgatgcttccctcaaaatggctggcttctatggattgtatacctggctgactcatactatgtttggcatcaatattgtcttcataccatcaggtaacaaccatattgtaccttccactattcgctatttaaggaaagttaagccattttacatacatctaggaaatgtctacttcctcaagtttaaaaaactaaattttttggcttgagatcgaatctagtccacattaggaacagaaatatgatttgtaatgtgtttgtttattgctgtatccccagcagctggaaccatacccagcacatagaaaaaattgctgtattagtctgttctctcactgctataaagaaatacctgagattaggtaatttataaagaagaggtttaattggctcacggttctgcaggctgtacaagaagcatagtggctcctgctttgggggaggcctcaggaaacttataatagtggtggaaagtaagggggaagcaggcatgtcttacatggctggagcaggaggaagagaggggagaggtgctaccacagttttaaacaaccagatctcacgataactcattcattcactatcatgagaacagcacctaggggtgaaatccacccgccatgatccagtcacctctcaccaggttttacctccaacattggggattacaatttgacatgggattttggtggggacacagatccaaacccgtatcagttgccctacatgtttgttcaatgaatgaatgttctagcacttagcataacacctaggacataattggctctcagtaacgtttgaattgaactgattggcagggagcaacgtgttgtcaaaatagctttgtccatgagggattacatcccagggcaagatgaatgcttctgagggcacataagctgcctccatacctcttaagatctgttgtggtgcttcttctacttttccttcctttatttctatggctgcttgttttcctaaatatctctgccttccacatttgcctctaccacatccccccctttccctatttgtctgtgcttccttctacattgtcaagttcattcacgttcttctctactgtgatgtccacaaacctaccctctgacctgcaagcaccctgtgaggcgggatggtagacttgtcatatagatgagagaccagttttccaaggtcatgtacctggcttctggtaggaccagaactagaaactacatttgctttactcttaacttggagagaagccagatggaggaagagtgcttgaacatactgctctggaagggaatgaccttgaagcagggtccttcaactcaggattttttctgtttatttttattatgctgaggtttagaaactaatttctgattgggctttggactcagtacaagttttgacacatgttctgtaggtgtatttataggaccgtatattaactattgattgatagtagcaactacagaacccttgaattttattgcttaagaagagatccataaataagacacacacttagaaagatttttagtatcacattttaagatattgagcctttacttagctagaaaattcagttagatagggcatatcatttccctaatatttgagtttgtgagtatttaacttgttttgttggaagttgttgaggaggagctactgcttagattcttttgctttgttagtgttttgctgatgatgttaagttgtttttcttttactcttttttcagcattagcagcaatccttggagcagtgccattcctggggacatactgggcagcagtacctgcagttcttgacctgtggctgacacaagggttaggatgcaaggccattttactgttgatttttcatctcttgccaacatactttgtagatactgcaatctactctgacatatcagggtaagtaagccacagaatttcttattagtgaatcatccaggcatttccgtttttttttttttaaaggaggatttttttctcctgggggtatacaaaagaactggtagtaggaattttcagtgaaatagccttttgtgttcccacaaatgaaattttcattgaaaatagtattgtttacaaggcatgatattttggggttttttttttttttttggttgttgttgccccagagttccagagcaactttttttttttttttttttgagacaatatctctttcactcagactgctagagtgcagggtgcagtcatggctcatggcagccttgaaccttgaactcctaggctcaagcagtcctcctgccttgaacttcccaaggcactaggattacgggaatgaaccaccatgcccagccaatattttcttattacatatgtaatatttataatatatatgatgtcctgggttaaaaccaaattgtgaataattttctcttgatttagtgacatttaacctagaaaagaattatgaccagatgtacatcaaatattttaagtacagtgaacagttaatgattatttttatctcttctttggttttggagaaaatgttgttagattgtatgtctgaggatatccatgtgaaaccaaatctcagcaagttaatttctggcaagcagagctctctaaagatataattggaatggttctatgataaatacaggttaaatctaagtcagaatcaacactttagccatataatacaataaataaatgtctgtttttataggttttgacatctcttttagaaattgcattaagtatatcaagccagttctcagtcacattaaaacttgagagagaaaattaaaaagctgaacatcatagtgtggttaactagtgtgtcacagttgacatttgagcaggaataagtatgattaatacttaagtgcttttatttctttaaactttgctgtaaattttatattaaggtttacagctggaattaaagaaacactgtctttttttttttttttttttttttttgagacagagtctccctctatcacccaggctggagtgcagtggtgcaatctcgcctcactgcaaccttcgcctcccaggttcaagccattctcctgcctcagcctcctgagtagctgggattacaggcgtgcaccaccacacccggctaatttttgtatttttactagagatgggatttcaccatgttgatcaggctgatcttgaactcctgacctcaagtgatccgcctgccttggcctcccaaactgctgggattacaggcatgagccacgatgcccggcctaaaatactgtctttaaacgttgttattgggaaatgaaaggtttggcataaattgttttattttttaataggttaagcttttattcataaactcccacacgtttttattttttttaaaaaaagctttaaggctgagcatagtggctcaagcctgtaatcctaccactttgagaggccgaggtgggtggatcacttgagcccaggagctcaagaccagccggggaaacatggtgaaacccgttctccacaaaaatataaagattagtttggtgtggtggcacatgcctgtagtcccagctactcaggaggctgaggtaggaagatcacttgagtctgggaggtcaagactgcagtaagctgtgattgcggcactgcattccagcctgggtgatggagcggaataaaaagctttaagcatttttgatagttttccttgaatgtgttgtttagggaagaagtttacttagcaaacatggaatactgccctaaatcatttttttggaatgagaaagacaaacacattatgaatataatttattggtttcctgaagactggttctccacaagtcttactttgatttagctgtaatatagaacatccttccaggatatttagttatttgcccctcactgaattgttcttctcatctatgtttaaaactagaaacaaacagaatgtgacttatttcccagtccttctgatgtcagtggtcctttcttgtcattatcaatgtgctatgctactgtgttctgttttatttcattccgcttacataagtgatactgtaataagctggagggcatttgtgattctcctgtgaaatagaaatcttgggctttgtgacagatattttcctcaggaggccttttatcatcacctatgttaaaaactatattttaggaggttgccaaaagtctgacctatgagtaacagggatgctctcattgttgctgtcgtcatataaaagcataattaactgaattacatgctaaattgtgctcacttaattatccttgatggaggttaacttaacaggtgactcctaaccagtcccaagccaacattaacccatcataggcaggcacctgtaatgggtataaaatatctgttaacattgctggctttattctttcattcctggagctataaaaagaggcagatgtcatccataggaaaaacaattgttgcatctcaatattgttgcatctcaatattattgcagtcagtgttcagttgtatgcatcgaggtgatctaaagaaagctgataatatgctaaaaagcatagtgtattaaagaatgcacattgtattagaaatgtatttcagattttttccagtttttgtgtgttaaaggtcgtgctctttattccagaggtggccatccttacctgacaggcttggcagtggccggtggagcatactacctaggcctggaaggagcaatcatcggtcctattcttctctgcatacttgtggttgcttccaatatctatagtgccatgctagtgagtcccacgaattcagttcccacgccaaaccagaccccatggcctgctcagcctcagcggtgagttaaagcagaataatcataagctgtatttatacattgaactgtcctgtctctgtatttgataagtagcttcatccagacttgtcaggataaaggtatttgagtaccaatgctgtgataaaggttgcagaagacactaagtaaatacaaatcgttggcagagttttgggtttcatataccaagaaaatttaaaacctatattggggccgggagcagtggctcacgcctataatcccagcactttgggagaacaaggcaggtggatcacctgaggtcaggagttcgagcccagcctggccaacatggcgaaaccccatctctactaaaaatacaaaaatcagccaggtgtggtggcacccgcctgtgaacccagctgtttgggaggctgaggcagaagaattgcttgaacccaggaggcggaggctgcagtgagcccagattgtgccactggactctagcctgggcaacagcatataaaaaaaaaaaaaaaaaaaagacctatattgggtgagaattgttaatgtcttgaaaagccaaaaataaatttaaaaaatctaattctatgcgggacatggtataccagattgaaagagactcaagaaatggacaaccaggccagatgtggtgtggctcatgcctgtaatcccagcagtttgggaggctgaggtgggcaaatcacctgaagtcaggagtttgagaccagcctggccaacatggtaaaaccccatctctactaaaaataccccaaaaattagccagatgtggtggcaggtgcctgtaatcccagctactcgggaggctgaggcaggagaattgcttgaacctgggaggtggaggttgcagtgatccgagatcatgccattggattccagcctgggtgacagagcgagactcttgtctcaaaaaaaaaaaaaaaaaaaaaaaaaaaaaaaaaaaaggaaaagaaataggacaaccaaatgcattgcatgagtctgggatagatttctggattggggatgggaggaatatttctgaaacaattggggaaatttgaacatggaccatatgttaaataatatatcaatgttaaatttggtttaaccaatttaacaatgatacttcgataaccaatgatacaatgataaccagtcataaccaatgatattttggttctgtagaagaatgtcctttaaagatgacgtgtcatgatgtctgccacttatttgcaagcagttccgccagaactgggagagggagagaggaagtgactgtagcaaaatgttaacaattgttgaatctagatgaaagacatatggttgttaattgtaccggcatttcaattttgtgtaggtttatacatttttaaaatacaaagttgggaaaaaattatttgggacaccaatatagagttgcaacatgttattttgtaagtacagatattaaaataaaaagtactgttatctgctgtcaccagcatttcataaaataaattataatgtttgaaaatttttctcaattgtcttataattttcttaaatttctttaggtataatttatatatggtgaaatgtacatctaaatagccaaatgtacctctaaatagacaggttgattttttcatgtactcacacccatgtaaccactactcatatcaaggtatagaatatttttgttgttctggaaggcttctccctgcctcctctcagtcagaccccactgcctgctgatactctaaccatagtcacttttcattagttttgcctgtttttgaacttcatataaaagaaatcatatagtaggtaggtactcttgagtcagtcctcattgctcaacagtgtatctgtgtgattcattcatattgttggatgtttttctctgttcatggttcattcttgcattgttgtctaatcttccattacatgaatatattacaatctcatttaatcattgtaggactaatagatatttgggtagtttgcagtttatgtctgttataattcaagatgctatgaactttttaaaaaaaatttcttattttgccacgaacgtttttgtacatgtcttttggtggacatgcgcacagtacttactgtagttggacatatacctaaaagaggaatgtctggttatacatctggttttaagtttaggtggatacttaaaaacagttttctatgttatgtgccagaaattacattttaacaacaaaaaagaaggacagtctcagaataaaaagtaaaatgttttgaactttccggaaactatatggcattctccttgttatctgcaattggaaaacactagttttcctgccactggatattctcgtgtaatcaaggagtcactgacaagttggttctgacaatgcatttaatgaaaatattttatacttttatgtaaaattctttaacaacatgattctgcttaattttgtttttagtgttatattttgtgaagagagacattgtcctttaactcagaacaaatgcagtaaagtctctgagttagagctggttagggggccattttagccaatgcgtgatccttagttgatggcaggggaaaatcagtttttccaaaagaataaaaggagaggtgcttcggtgattttgacaagggccttcccaatttggtggtggtgacactatgatatccttttctgcctttgcctcttaaagacaagtgctcagatacctgagaagccagcggtgctcgaaatcaacagaatgcacttgctaacttgaggctctgttccatgggctcaccaaacacaaagaaaaaagataattgatcaatattttgctgttattttgagaaaaacttaatgatttcaagttactaaagcaagagttagtatttaaggtgaaatgaaagcaacttaaatgaattcttttagaggtaataaacctttttaactctttgtccttctaaaagtacaaaatgcttatgtggcgtggcagagtagaaaaagataacgtgaggacccatatagcctttgtctttcaaagttactcatgcatgagtttaaagagtcaaatttctacaaaactcagtgaaaaataaggacaataaggactttgccttctccctcttcttcctttttctaagaggaaccactttttgaccctgtattattttgatatttacctccatatcttgaagtgacgtatttatttctgatttggtcatatataggcatcatctaataacttccgacttggaaggttagaagttagctttcactacccattcccccaaaacaaacggtgatactggttagatcagtattcaggttttacattattatgactttaaattatattcatatttgagccttgtcatatattctaatatttctttacccatacgacttttgctttctcttgaattaataaagatactggtttttatttgctttgctttccatgtacttataactaatcccatctcaagctctgcaccaggcactcacctctccacttggtatgttcagtcgcaccaggcatagttggtcttctaaagaagactgtcctaagtgccctggtctgccccagtggagtgctgtccttttggcttgctgttcagcggtcaccttgggtattccctcaactctcccttgcattggaatccttatttcttataccctatataattttctttcttgatttcttcctttttggtggagcacatcctcttatagattttcgggaaaatatgcataggaggtaaattttgagggatgatgcatgtctgaaaaagcttttcctaatgtcaaacttaatccgatagctttcctatgtagagaattctatgcttgaaattttttctttaacatttatttcttcattgttttctggcttctaggattgttgttaaaagtctgaagcaatttttattatttattcttgttaatttgactgtttgaagacatataagatctttttgtttatctacggtttctgtcctgatgggcacttgctaagacctttaaaagtgaaaacttgtgttctggtgttctgacatttttcttgagttgtttcatgatttccttttcttctttcagaaatttattttattttgactttgaccctcatggactgggcatttcacattttacatcctttctctcttttttcacttgtgtctttttggctccattttctgggtgatttcttcaactttatcttgtagctttactatagaggtttccatttctacttgcacatttttttcagtttcctttattgaggtattatttccttagagtaaaatgtacctttttagcgtacaggtttatattttgtatgacatgtaacagattacacatttagcagcttaacgtacatttacgatacagcttctgtgggtcgggagttcaggcaaaacttggttgggtcctctgcttaggacctgaaaatctgcagtcagagttggggtttcatctgtggattggggttctctttcaagcagtcctgttgttggcataattcatttccttgtagttgtataactgaggctcatggctcctagaggctgcctctcttcataggcagctgataatttgggtttttgcttctttaaggccagcgggagagtatttttctaactttggtctctgacccctagactttttaaaagaagagctcgcctgattagacccagcccacccagcataatctcttttttttttaagtcagctaatgagggacattcattatatctgtaaaatccatccacctttgccatacatgttgagcatcccaaatcccaaatcggaaactctccagaatcagaaattttttgaatgggaacatgatgctcaaagaaagtgttcgttggagcattttggatttttttttttttttgagatggagtgtcactcttgtcacccaggctggagtgcagtggcatgatcttggctcactgcaacctctgcctcccggattcaaatgattctcccgccacagcttcccgagtagcggggattacaggtaggttcatgccactacgcccggctaatttttgtatttttagtagagatgggatttcaccatgttggccaggctggtctcgaactcctgacctcaggtgatctgccctcctcagcctcccaaagtgctgggattacaggcatgagccactgtgcccggccagcattttggattttagattcttggatttggggttagtataatgtaaatattccaaagtgcaaaaaagatgtgagtcacttctggtcccaagcatttcagataagggacactaacctgtattaacagaaccacaatatcaggtattgaaggtgtttggctgttggctcatgttaagaatgagacatggccgggtgcggtgggtcacgcctgtaatcccagcactttgggaggtcgaggtgggtagatcacctgaggtcaggagttcaagaccagcctggccaacatggtaaaacactgtctctactaagaatacaaaaattaggcatggtggcatgagcctgtaatcccagctactcgggagactgaggcaggagaatcacttgaacccaggaggtggacgttgcagtgagcagagattgcaccattgcacattgcaccactgcactgcagcctgggcaacagagcgagactctgtctcaaaaaaaaaagagtgagacactcagaagctgtggtggattgtgatatgtgttaccataatatgatgtggcagggccactgctttgtccagcccttaatgtcagtgattttggtcccctttttgggcttgtatattcctcaaagaaagagcttctaatctcctggctagagactaaaagcctggctgccagcctcctgggagccaggaggaggaaaaggtctggacagccttcaagatgtaaacatccacttaatctcccagtgttgggatggatgcccaccctcatttctgcctgttgtgcactagttcagacgctttttgttttaccttctccagaggggaaaaaaacctctagttttctgccaaggaggggagagggtggagtcagctgcttggctggggtgggaggtggggtgaggatatcagagggtgttgtcttactgctctttaaggaaactgtaaagcagtcctgtgtttacccccatctcccaccctacttccggagttacttgatgtcaccagttcctaaaccttatgggggatttcgctgaataaatcagaatgtttcctggcctttctcactactggtttaagatccagctttttagggtcttgtgttagtctgtttttcattgctataaaggaattcctgaggctagataatttatataaagaaaagaggtttattttggctcatggctcttcagactctacaagaagtatactgccagcacctgcttctggtgaggccccaggaaacttccaatcatggtggaaggcaaagggggagcaggtgtgtcacatggagagagagagaggaagcaagagatgacaggctcttctaaacaaactgctctcacctgaaggaatagagcaaaaactcatttatcattgttggggagggcaccaaaccattcatgagggatctgctcctgtggcccaaacacctcccactaggcctcaccttcaacattagggatcacattttaacataagatttgcaggggacagacagccaaactctatcacgtatgccaggtcatagcagtcccacccgctttccaccttcttagaatttgttgcttttgcctcttagttcttttttttttctttcatggcctttgctgtccgaggtgcagccgcactggctttccatcaggcctcagatacaccaggtgccattgaaactctgggcctttgtgcacgctgctttctctatctggataatcctccatctggataatcccccatttttccttcttaacgaactcctaactattcagatctcagttcaaatgtcagttcatcagagaagcgtttcctacccccaagattaggttatggcctccttgccagtttaatgtgtttatagtttgcaccttgtacttttttttttgtagtgcagttttcatttatacacttgattatttttctctctcccccatcccaacttgactatagttgctgttactgccaggaccaagtctattttaattactgatgtcaacctctgtcaacagtattttgtactcagaatgctcaattcctagtggaaggaatgaatgggctgtgagggaatagtatctacagaagcatgagctctgaaagggcttggctttttctaggaatttgtatattgttacagtgtgacagtagagaatagatggttgcattttattaagcagacatacctcttaattccacactgcaaaaaaacttgttagactactatcttcacacagatgaatgcccattctccctaaggaaagattgtaggaaggaagaccttctctgctgctcactgttgatagtgagaatgtagtggatacagcacagctttgggctcccaactattttggcctctgctgaataatcagaacctttcacttcctctgttctctattaatagtgggcttgtttagggagatgggatgtgtagggaaaggcaaaaacacccctgtagtcatgcatactttctggatttttggacaggataatcagacttgctttgatagacttctttcacttctactaaaaattgagcagcagtctctgaatattaaagcccagaaaatcctgtaaggcatatgtcccaggaactctttcagggatgctattctccatattgtagttttcctttgccctctgttacaccttgagaggaaggtgacaactggaatgtggtcctttaggaactcagctttatctttctctagggaagattgagtaacttgtggctgtttttgtacacgctttcttaacctgaggtttatatctttcataattaaataccgaaagtacaatcaaaaatgagtatccgctgggcacagtggctcatgcctgtaatcccagcactttggtaggccaaggcaggcgatcgtttgagtccaggaattcgaggccagcctgagcaacatggtgaaaccccatctctgggtctctgcaaaatgaagtataaagatactccccataaaccatccccgcttctgcagatctttacactaaccctaagaatttcacttggggtgcacttgctgtcattccactttagaagattgagaaaagagagtaaactggggctgggaagggagtacatttgatttactttctgttacttgaaaatttcctgaatctgctcatcctctttactcccagtggtgtgacccactgccaggatttcttcagcagcctctttactggttcctgcctccagtctggcctccctctagtctgttcttcatagtatagcttctctgatttttctgaaacataaatattctattctgctgctgcttaaaattcccacagtggcttcccatggccttcaagataaagctaacacattaatttgccctgtcagacttctcatgcctttcttctctctacttctccagattcatctctgtgctgtgtgccttgcattttatttttcagctgtattgaacttgttttagttaccagaaggcagtgtcatctttgcagtgttgtcccctctgtaaagaacaccacttccctcctagccaagtccagtatcatggtgtatactcaaagtaccctttttgtgagaaacattactgaaactctgaactaggtaagaagtccttgctgtgtccctgtggtatcttacacttctgttggaacttaatacgcgttttatagatgtgtgtttaattcattgttttttcccattagttggtaagctttttgaaggtgggagctatatctaactttaccactgttttaccactcctaacatggtgcttggcgcatagtaagtgctaggtgaagatttggtgaatttgtggattagtgaaaccaaaagcagaatacaaccttgaggctgataaaagacgatgggacatagtaaatcctagccttagaactttattccaaatttgttggaagggagggggtatgtataatagtggttgcatgtgctctgtcacaggattgtatgctggtgccggtgtaggaaatacacactcagtgctggggagccagctaagtaagttaaattagtcagttacaactttcaggcatccataacttaactctgcctgtctaggaggctggaagtcaacaagtcttgagttgttaaatcataaatgatttacatatttacatggagggaagagggtagggggtgaaatgaatttgtaaagatctcattgaaagtttggggcaagcagatcccaaaatattttcaaagagcaaggaacagtgagagactacactgcacaatccctgttgctctgaaaggaggtgtaaaatgttaacagtcctctagtcccatgtgaccacagtcacatgtggtcccattctgcattgcttattctttttttttttttttttggaaacagagtctcactctgtcgcctaggctggagtgcagtggcgcgatctgggctcactgcaagctccacctcccaggttcacgccattctcctgcctcagcctcccgagtagctgggactacaggcgcccgcgaccacgcccggctaattttctttgtatttttagtggggacggggtttcaccatgttagccaggatggtctcgatctcctgacctcgtgatccacctgcctcggcctcccaaagtgctgggattacaggcatgagccaccgcgcctggccacattgcttattcttagacgagaaattctatactgtgattccttgcagcataataatccttataatttgagaaagaatactgtatttagatggtttaagtaggatgttaaacattttcagaaaatagtgtcaatacagtatttgtttctaacgtagagagttatagttttatgagctttacttattagttagagctatgcctctggaataagccaaaaaccaaataatttctgcatctctagactatagatattgttttcctggagataattagaggtttgttcaagatcagtgttacttcagtagagttctgtagatacacacacctccccctccatcaatcaccctaacaccctacatacctagagagaacattgagatgaaagactcttagtaactgatctctaagcttgcttcaggttgttggttttctttgttttgtttgtttgttttcctgagtccttttggagactttcttggcctggagacaaaattgaatagtagttaggaatttcaaggttacagctaagctcacttgtcaacagagagcagtgactaggctaaccatagccttaatcttatttaatgtgtctttgccctgaggctgaaatcttcattcataatttagaggaaatgaatagttaatagatataaaattacaggtatctgagaaatttgaaaagatgtcagggaaccccgttgggtattagaaaatgctttgtagtattagccagtttttgactattgcttgcaaagattttccagggcttttcagaattaagtgctacctgaaattcatattgtctgagacagcagccagcttggcctgtagacaaatgtaaaaacacaaacttgggtgagactgtgaaaaatagctatctagagctttagttctgacaggagtgtgggggtgatttttttctccccagacaatttctcatgtctggagtcattttgattggcattctagttgaatagaggccggggatgctgcaaaacatcttataatgcagaaaaatttcaagattgagaaacactgatttgagatagatagatagatagatagatagatagatagatagataatgcatataaacatacatgtgcgtatacaaatcttcacctttggacttgttttcagaacataaaagtctttaaggaaagaaaattcatttcaattattagatcagccagcatctttaaaaatggttggtgtattcatgtcacacataaaccctctcaaagcctcaggagccatagccaggagactaacagtttttcaaagtagagctgtgctagtagaggcgtgcttcagagatccagaggcttagggcaccatccttgaaagagccttgagataactgaacatccttaaaggtaatttcttttctgtgacattttacctgttcccctcttgacactgaagtactttcctcattgagtgctgcaaggttagtctttaattgatctctgccttgcctatgggcctcctaaatatttatatgaattgagaggagagaaaaggagtaagggagggggcatgattgtggaattacatttgaagttcagattgtttattttatgagtttttaggtgattgtacctaataaaagctttttgttatctttagtttctactactgtgagctgttccttaggttttggaacacttactttatattgtacttcaatttattcctccttcccttcctccctcccttccttgctttttttgggggggtggtggtggtggtgcagggtctcattttgttgcccaggctggcctggagtggcatgacctaggctcactgcagcctcaacctcttgggctcaggtgatcctcccaccttagcctcccaaaagtataaaaattagccggatgtggtgtcatgttccctgtagtcccagctactcaggaggctgaggtgggaggatggcttgagcctgggaggcagaggttgcagtgagctgagatagcaccagtatactccagcctgggcaacagagtgagaccttgtctcaaaaaacaaaacaaaacaaaacaaacaaacaaacaaaaaaccaactgtaaagtcaaatatttttctgtatttctaatatgtggacttattgtaaaggagcaatataacttctatctaaaagaatggtaatagactgtgctttatatctgtatcactgttgcataaacatctggtcccagcctctctccatcctgatgtactgccagccttggtgtgaggcatttttgtctaatatgggtgcttgagctcatgttcattgataaattctgacctggccatttggctgccagcacagatgtaaatttagccaggtgatttatctcagctcagacatgtaaattatgtagcaaaagcaagctagctactacagtactgagatagacacttcatgtatgcagcagtcaggcacggtgctcagccaccttcatccagcccagatattacccgccaataacattgttcgcttagcttgtttaatgtgggtcagaaacagttcaagtacaaggtcacttgatgaaaagacctaacccatttttcctgcactgaaccacatcccttagagcttggactctctgttggattacgatttctattttgtaataaaatgtatccacttagcatttaatctttggtctcttagtggtttttcctctttaacatcaatcatcatatccacttccagccagtaacaaggtggaagagctgaagaagattgctcttctcttttaaggaactgcccagaagttgcacaacacttctacttaaatctcattaaccaaagcgtagtcacgtggtcatgtgtagtttcaggggagtctggggaaacagtcctttggatagatccagcaaaaagatggagttcttgttaatgagaatgagcaacaactagcagactttgaaacaatactcaatgaaaatcttaagaaaaaatagtgactatataatctcattagggctccaaaagattgtaaaaataggatactgttttatggtaatcaactaatcattccgtctttttttcttttaggactttccgtgacatttctgaagatctgaaatcttcagtaggttgatgtggtttcctctgcagtgatttttctaggaagttcaaatttgacagcgagttcagctcagctgtggccctctgcccttccagctgtgcctagcaagcaaaacccaggaaagaagcagaagcctcctggccttacatacagaatgcctggacaagagagaacttgctgcgggctgctttgtattttaaaacacagcttgagagttcagagttggtggtttgctcacttaactgttgttaagatggcttgaaaagtttcattttatacactggtaccctggcttgaaatttttccactttggttatctatgttactatattatatatttataaagttattttaagaactctaaactacctgctgttaaaagaatagatggtgtaattttttcctggtttaagaaatgtattgttaaacttttctaagacagtcacttttcaaggaagagggctttcacttttgagtgtgtagttgagtgagcaggaaaaatgaatcttctacccttctcccacaatgtattatacgctctttaagaaataataaatcataagtataagggtggggtggcttatttgatgttcagttttatattataaccctgggagatacaaagactgaagctcttcctcctcttccttttctcttcacgcttctttacactattgccaaattataaaacttggctgaccacgttgaagtgaaatacttattaagctgctatgaatggtaacagtatgataaaattcatgctgttattaggttttctccttccaggtggttgaagtgaaaaatctcaggtgtagcaatactctgatttgttaaatgtatccgtttcattatttggaactctgccaataagttagttttcagcagaattttgtatttatgtagtattttcccatctcttagcacagtgccttgcacatgactctaaatgaatgcttgttgaattgaattgcaactttaaaaatatctcagatatcacaataaccagcatagtgctttacattttacaaagtccttttgcacatactatttcacaagtacatcacatcagctttcatatagctttatattattttacatcagttttacactgatggagaagctaaggttcagaaaagtgaccaactcaaagtcgtaaagtgtagtaggatttggcctcagatctttgactccgttgtgtgcagattctgctgtattagtgttccttctaaatattgtatgcagttttcccagtgttacgagattggtgttgctatccatttgttgtgaatgaagacttgtcctatagtacatgacagggctgagagtggactgtagttcttagctgaaccctttctactgtttaaaacaatcatcaggcctatcctctgctcccaggggaatgtgggagagaaaagggttcttggccaggctgtaggtggtggctcacatctgtaatcccagcactttggaaggctgaggtgggtggattgcttgagcccagggatttgagatcagcctaggcaacatggcaaaaccccatctctacaaaaaaaaaaaaaaaaaaaaaaaaattagctgggcacggtggtgtggctatagtctgagctactcaggaggctgatgtatgaggatcacctgagtccaggaggtcgaggctgcagtgagccaagatggcgccactgcactccagcctgggtgagagagtgagacactgtcccaaggaaaaaaaaaagtgttggggggtagttcttaagcgttgaagatttcctttttggaaagtatttaaaggtagaaatattaataatttttcctaaaacatctccctaagaagtcactgataattataattagtttaaatttattcttacactacttaagaaaaatttcatttagaaaaggctaccatgagatcttttgactatatggagtagactgcatacagatctctttatttctattatgaatattttagcgattataatcagctattccactgagtattagatttggtcactaagtaactcatgtttttctttagtcaatcattcattcattcactaaaacatttgttgagagttggctaaactctagattctgtgccaggcactgtacagggtgatggagatcactcataagaaggcctcttgctcttagccagatcatatgtaatactaaatttaaattttttgcattaaaaggctaaaaaatcatttgtttttgttaattatatactggttgatttatagatgtaattagcacatattcataagagacaaatatatacaatgagttactatacatatacaaagtgattttagctgtataaagtgatattgcaaaaaactacagctaatgtttcttgctgggtaattattagcataaatatcaggttcttagaggtctttaagagaatactttagagctaccaaaattagcagcagtgatgtaatatcaccctgaaataccaggagcagaggtgccccagagtgcttcacagctatgatcaggaaacttgacctgccccattgctacagcaacggcataaggactaggaaggtccactagctggggaggtcttggaaccctccgagccagaaagaagcattccagcatgattcctcagatgcaatgaggaaggtttacagaattttcacagggcaacagagatcaagtggtatgaaaaggtaggagttttaagctcaagtctcaaagataacctacctttacattctcagtcagaatttgacccagaaagaggaagtttcttcaggaacagaccgtacgttgatgaagtagaagtcatttcagtaaaaacggagtacagaacttggtcataatatcttgcattttatagatttattaaagattagtttcaagttcacattcgctattcagttgtaaaccgaatggatgggaggggagaaaatacaagctctccacacaggtatgctcctctcttttctgagagagaaggcatgggattttcagcataaattccatgttatgtgagtgctgtttgagttctgaagttcctatcaatatctgttcctgcaagtgatctctgtaagaccaccttacatgctggtcttagttattgttaaaattgcaaggtttcttcacaccctctttgataagaagtgtttagctggcagagctttcccttgacttctgagtctagtgtgggttggcccatgacagtgggaagaaatccaacatgttacatggagaccttgtatgtaaacaaactctgtagcctttgaaagtggaactgctttttacagttaaagggctgctaaatggcttgcagatgagatcttctggctcaccttgatcttcacatgaacccattgtgacctatctggatttcctaggacctgtagtttccatttgggttatattagtgcctcaggaatgtgtcactactggtcaagcaatactcagaaattcaggctgtgaggggttagattagaggaaagtaatttaggtgagctatccagagctttcaacctcagggtttatagggaaaaaaaacaaaatacaaaaacccttaggacttctcatactctagccctgaccttgcagtctcctctgaggggcctcctaagacccttaaaataatattacaataggactttgagtgtgcatttcacagtggaaatagcctctggctagcattacttccaaatgctagttccagctaaaaacaagtactttttattagtttcttgtctttcaacattctgccatcaaaatatattcattttattaacttaccgattattgggaacctgcaaaaaaaaaaaaaaaaaaacacacatgctgtctgcagccactgtttggttatttttgatagtttaagagaattataaatcaagttgttctgtctactagagtcagaaattctgtgctagaatgggacttctaaaattaggtggtcctgtcactttctagagaaagacccaaattcataggtttaagtggcttgtctgacatacacatacagccagttagtaacagaattcagaatagaatagagttcttttttttctgtcagtccgttgttctacttctctttccttttcttcatggttgagcagcttttggcaaaatgtgttccatatagcagtagttccaagagatgttaatagatgtaagaaaaaaagtgtgtgtgtgttgggggtgggggattgcatggtcaattaaaatgaaggaatgctgagtttgtttccttactgtaggacttctaagagttttgaacatgctattacacattgtgaatttataaaaggggacaaacactgtttgaccttagactgcactccccttctttattcctcagagcatctcaaaggactacagggtcctttgagaaacatggcccttgatcaagtttacaactctttgagaagacatccctaatggaaatactgaatggcagatctattactgtggtaccatgtagtgtgtaataaatcttgaagtccagaaagcaagtatatttgctgtttagagctatacttaaggtatagagattcttttccacctgtggtgtgtaaaatcagtattgtgtttaattttgcaggtttttcaaggatcaactaatgtgcaaatacagtggtgatatattgatattacattttaataatgcttttgtatggcactttatagttttcagacaccttttgtaacagccctgtgagacagacaatattatccttattgtacagatgggggggctctggaggctctgaaaagtttttggtgatattcccctaagtttataccacaaaatgatggagccagaatttagttgcagaacttctgactccaagtccagagttctttactagacatctggtttcttactagctttttgctagctttttattttacagtgaaaagtatggaagcaaatcctgataattttggcttattatcaaatatcatttattttttattgcagagacccagcagatgtaactctcattgtagccatcccaaagaaaacccttctttgccctttgcagtgccacttatttaggtaactgaagtgtatttccagtacaatttgattttgaactaagatttgatatagagttgtaattgcttacataactctttgaaaatgtatcatccctgggttctcaggtgaaggaggcaattcaaaagtaaaaaagaatattcgaatacaataaataccctctgttctcacacaaatgctgtttcttagctaacttgctttgacaacctactgatgtaacttctttattaatgtgaaatatttatattttgaaataaaattactagtgttgaatgaatcatgtggtaaacttaatctcctgtgtgttgaaaaacttgatcttttgtgaagccaaagtttcatgaatccatccgtctcttaggccttctgttatgccatttcctccggcaccattgtgtacactgaattcttaggagatactgtcaacttcgtaagggaaggtgtgtccaggaagtggacactgggcgccttaaagaggtcaagggccctcagtgcacaggggaaggtggccttgtgataggtaaggaagtggtgagatggttggctgagaagaattggaagaaaaagttggattgaggacctgtcctttttgaatgaagaaaaagaagctgaagcttggctatcttcaataccaaagacagctgtgcagcactggtagattgatgaagctgaagctacaggttgaagcactgtgaagcgcctttcaacggtgcttgggaaagagctttctgatgcctcaggttgatgtacccagctcatcaatctggtgttatggaagaagaaatgatccaggccaaggtgtccgggtggactggccagcctcagattcttttttactctgacaggttctcactggcagatatggtagttgacaaaacattttttcatgcttctcagtctgttgcttaagtctggaattccttcacggcgtgcatactgctgacaacctccttttggccttgctcctggagaccttagaataggagtcttcagctccccgcccccatcgtggggctctgtgcgagctcagagttgtgcttacagaactgattcttacccttcccctcaagtgagttgtcagaaatacacacttggtgttttcatgcaatgaacagttatgaagaaactgctctgtgcctggcactaggaaaaaacttcgaaaaatagttttaagaagtagtgttgaacagtagatgaggctttttcatgtttcttttaaatttcttttgaataagtctaaacagtagtgtgaaagatatactgacttcctgccgaatacccagatactccattaatgattgcattatcaaatgtttccccttcaatccagctcaaagtgtttgtgagaaatacatggtgaaagaatgagcagggtggagtggaaattggaccttccggagaagccccaggaagacattaccactggaattcccgtcccaggggaaaggcccctcccaacagacttgattctggttttggtctaccagtttcaaccccagcacagcttccagaagtctttgcgggaattcagagctgatttaggacgagtcacctatcgagaggacgggaagctttgctggggacgcttgtctgtccaagtaagaggaggccatgtggctgtgtgacagatgtgttttgtttctcctcgccaccctggcgagaaggtgcctggaacccatggaaggggtctgagaagagataagggcggggccatgtgggggcgggacccggcttagggggtggggttgcagggagcccacaccaggctggactgcgcgggcggggcagaggccgggggtgggcggggacatacggtgacgggcgtcggggacgcagggttggcggcggagccctgggggggcgggcccctgggggcggggtctcggttggcgcgagtgtcctgtcgccgccgcctcgggcgggtgggctgactggcggcaggctcgccgcggcgcggagtcccggctgcgggatagaccgagggccatggccgcctctcccggacccgccggcgttggcggcgccggagcagtctacggctccggctcttcgggcttcgccctcgactcgggactggagatcaaaactcgctcggtggagcagacgctactcccgctggtttctcaggtaaagtggcgcctggcgcggcccctcttctccttcccgccgcggcccgcgatggcggccgccgctcgcacgaccggacgggaggcagccgctgccccactttccgcgccggcactgcggcgttcttgtcggaccgcctgtgtggggctccgggacgggcctcggcccgggcggcgagagactggataatccaaactccggcggcagggttgagtggactcggcagcaggggaggctgcggggcgggggtgccggcctgggcctttgcccccagtacctgcctcgggtctgcggctcccgggtgcccccggccgggcgatgccccctccgcggggcgagtggttgagcccagctcccgaggcagagaggacccccgcggggcccctcgctggtacttagggccctccacgataaccgactttgtcaccagttcgcagcctggtcccgagcccggctcctccgcctggggtattcctcccggcctccccgcccagcgtgcgctccctgatcctttgtccctccccgccgtaggtcagttcgctggcctcccattcatcccggccaccctaccccttcccctgaacctgctgctgctcacttctgcccgcttctgtccggcctcgtggaagagtgacgtggagactgtatgacagttaatccagatgcacaccgttttgccaagtcccgtttgggatgtgtgcgttactgtatttgccaatcagctaaccgacgccctgagttttaggaaagtttttgtttctctgagctgggttatatgcagcttcagggctagaattcctcacttaggtctgtggtaagatgccaagcactgtggggagtgaattctgtgccttcgggagcgcgttggcgatgtgtgactcacatctaggttgtaaccacttcgtgactcatactaggattaccaagattttagaggtagaagaaatcttaaagattatctgactaaaaattctttctttagcatccttgacacctggccaccagtaccctgcttaaacatgttcagtgaaggggagcctgtagctgttgcatagaattctaaatgctattatctcttctcctgcccagccctgcgcatatttgaaaacagcagttacacatgtccctggattcctgttatgctggttaaataaacatccctattttcttcaccttcgcatggctaacggagcagtgatgaatatatctgacactctccttcccttttcctgtgtctcattgaggctctgaccagtgggaaggggcactgggatccctcagtaatgtcagaccctccgctcctcgcctatctccactagcacaacacaaccaaaacgagaaacactggagcagttttaagaggcagagagataagagagtgatggagttcaagttgatagtattttatccattttttaaataacacctatgtaatgcttactatgtggtaggccaggttctaagcactttgtaaatattaactcattaattctcataacaatcatgtgaagttggtatatattctcgtggtatgggagaggaaactgaggaatagtgaggttaaataatttgttgttagggctttcaataagtgccaaactgggatttgaatccaggtaccctggctccagaaggttctctttgctacactatgctgtgtcctctctagagattagaagcagtaatgagatctagagaaaaagatggtacatagtggaaaaacaagctagaaagtcataatctggagaaatggcaacttttcacagtatccactgctaaaaatgtatcagtcttacagctctgcattgtgtaactctggggtaaaagaagccagagaagggtaggagagcagaggaagaaaagtataaatcactgctgagagttagaggtcaatgccaaaggggaagaatgcctgcctttttttttttttctttttccagttaaagccttgttcagggtcacagctgaggttttgcatcccacacattgtgtatctacagctacatctctaccacaacaccataactgatattcctcataattgactgtccttaacaagaaaaagttaaaatcaagaagtgtattaagcatggccagaatactcggttaacaaagcagggaagtacaatttagaatgattttaaagtttcagtgttaggagattaaaacagcagttctccagaaaactcatatgtccacaagtctcattttctgagaatgctgtattattacccaactcatgtttcaccatctcatccacaaggatattttaagcattttaagcaaggatttattgtgtgcttatttgttgctgttttttgaggggcttatattctagttggtagataggtcatgtatagaacagcacatgcaaagtgtcaaatgaacatcatcaatggtacatactctaaaagctcagagaaggcatggatgagtcagcagtgatgtcatggaggaggcagggttttgaggtaaacaagtaggactggcactatacggtttaaagtagacagtttctattctggtatcatctagcttcttctgactctccaagtgaaaagtcctgggttactggccttattctaagaatgcaagattttatcaatattagaaaaatgtgtatagttttttttgcattcacagattataaaagatgtattttcctaacaatgatgcagaaaaagcattcaactaaattcagcttctaataatgataagaagcacttagggaactagtgttaggaaaaagtgtccttaacctgatagagtatctacagaaaacttttacttaacatcatagcaacagtcaaatttaaaataaacatttcctttaaagccagaaaccagagtggggtgcctgctatgcttctactcagcactgcactggaaattctagccagtgtaatatgacaaggagaagaaataaaaggaataaatataggaaaggaaaaaccaaaagtctcagtgtgatataataacctatgcagaaaactcaaaacagtctacaagtaaattataaaaattaggagtgttggcaagttcactgagtgtaggatactaaaatcaattgcatttttctacattgataacaaacaaggcacaggcgcactggctggtgcctgtaatcccagctactctagtctcagctattcaggaggctaaaaaatgggaggatggcttgagcccagcagctgagggctgcagttagctgtgatcacgccactgtgctccagcctggccaacaaggaccctgtctttaaaaaataataaaaaaaaatagaaaaagtaattattaaaaaaatccagttatattaacagtaacagcaaaatatgagcttcctaagaatatgttgcttttgctatgtatataaagagaaagagctctatctctatgtatacacagcaaaagtggtcaaacttcatggagaaaatttaaaaattttatcaaaagccaacatggatctaaataaatgggagaaaagtactgtgttcaagcctaggttgacatattatagacatatcagttatccctattggtcaatttaatgcaatttccatgaaaatttcagcaagatttttcagtagaacttgataaaagtaattctgaagtttatatgaaagcacaaagggccaagattaggcagaagagaaacaaggtggatggacttgctctgccagatttcaagactcattataaaactatagtaattaagacaatgtgggtatcagaaca

SEQ ID NO: 848 - DNA, 4335 bp, Homo sapiens
agagtttagattgcgtccacagcgaaacctgcacaaacagttgtcaacagcggctgcaaattacaggcttatgaggaacgtttgaaaaatgccaagagttctttcctcaggccaaatactatggtagataaaagtatagcctttggagccagaatccctgagtttgaatcttgcctgtgccacttggtagctgtgtgactctggctgcgtacttaacggctctgtctcagtttttctgttggtaaaatgaggataataacaccttctttgtagggttgttctaaggattaaatgagttaataggagtgagccacttagaatagggcctgttatatggtaatctctatttaaaatcctgtcagatacaccaaagaaaacactttaaaaatatctgttaaataaatcagtaaaacagaatcggggcattggttctttaaaagtactcccccacggtattctagtatgcagcttgggttttaatatctgaatgtggcgccttttgggatctcgcctcgcgagaaattgacattaacgaatgagtgaaaggagcttcccccccccccccctccaggaagatatagaccctgcaaacttgttagcaggaccttgcggacaccaaggaggcggaggcgttttccccatttccccttcgggagttgtagtttcctgcaagcgcttggtgggtctgtaaaccagcggggaactacaactcccacaatctcgcgcgcctcccgccctgcctcccgcccgcgtttctagcccgactcccattaccgcccctcgggggcggctgtggcggaggaacgatggccgacggcggcggccctaaggacgcgccaagcctgcggagctctcccgggccggcgccgcgggtcccgcgcgcggtcgggccgagtggcggtggcggggagaccccgcggaccgcggcgctggcgctgcgcttcgacaagcccattaagcaggccttctacaacaccggggccgtgctgttcgtgtgcctgtgctgcggcgccgcggtgctggtctacttcatcctggaggccttcctgcggccgctgctctgggccgtgctatgcggcacttttctgcaccccttcaagagctcgctgacgcgcctgggccgccactggctgcagcgcctgcaccgcgcgcacacgcccatcgtcctggccgcgctgctcctgccgctctgcttcgtcgactacggcgtcgaggccctgggcgagcaggcgctgcgccgccgccgcctgctcctgctgctcggcgccggcggcccgctcctgtacggcctctactgcctcggcagctacttgggcgtgcaggtgctgctggtgcacgctgccacgctcatctgccgcgggctggactacttcagcagcctgtggatctggacgttggtggttggctatgtgttgactgtttcattcaagtggaatgcaagcactgaacgctacttgagagcagtttcaattcctgtctggattatattgctttttcatttagcatccctggctggctcatggagaattccagtattcctggttattgttttcctgatgtctgtgggtaccctctatgaaaaacagaatggaaaagagtcttctggggcagagttaccagggcaggttatctccatggcagcttctactctggcaaacttggccatctctatcacagggtatgaatcaagcagtgaagaccagccctccactcagcctgcagaagcagtggacaggggagaatccgctccaacgttgtccacctccccttcaccctcctccccttcacccacttccccttcacctactctgggcagacgaaggcctgaaataggaacgtttcttagaaagaagaaaactagtgacatctactttgtgtctctagtttgggccattgtcgtcatgcagatctggttgaacctgtggattgtgcagttgctgccagtgccgattgcagtctggatactcaaaaagcttgtcattcactttggagttgtggatttcctagagaaacgctaccatgtgtggtggggcattatagaaagcttcctgaaggagcggcagggagctctcgcgccttggcccattgtcgggcttggaaaattcttgttaaaagttgatagcaagctctggcactggctaaataagaagatgatcatctggttggagaagatgttagataaaataattagcattttcatcatatttttgttagtgataggaactcttcttttagccctactcctgactgcaaaggtacatcaagagagtgtacacatgattgaagtcacaagtaatttgattaatgaaactctagcaaatcaccctgagtgggcaaattggcttcctgaggctcaggtagtccaaagagccctgaattctgcggctaacaacgtgtatcagtatggacgagaatggataactcacaagctccataaaattctaggagataaggtgaacaatactgctgtaattgaaaagcaagtactagaactttgggacagactgtatcactcttggtttgtaaagaatgtaacacactctggaaggcacaaaggacagaagttgcatgtcagtcgtcagaatagctggctgggagacattctggactggcaggatattgtttcctttgttcacgagaacattgagacatttctttcgatcttggagtctctgtggatcgttatgagccggaatgtgagcctgctgttcaccactgtcactacactcttgaccatcctcttctacagcgggacagcccttctcaattttgtactctctctgataattttcctgaccacactattttatctattaagttccagtgatgagtactacaagccagtgaagtgggtgataagcctgactccactatctcagccaggtccttcttctaatattattggccagtctgtggaagaagctatcagaggggtgtttgatgcttccctcaaaatggctggcttctatggattgtatacctggctgactcatactatgtttggcatcaatattgtcttcataccatcagcattagcagcaatccttggagcagtgccattcctggggacatactgggcagcagtacctgcagttcttgacctgtggctgacacaagggttaggatgcaaggccattttactgttgatttttcatctcttgccaacatactttgtagatactgcaatctactctgacatatcaggaggtggccatccttacctgacaggcttggcagtggccggtggagcatactacctaggcctggaaggagcaatcatcggtcctattcttctctgcatacttgtggttgcttccaatatctatagtgccatgctagtgagtcccacgaattcagttcccacgccaaaccagaccccatggcctgctcagcctcagcggactttccgtgacatttctgaagatctgaaatcttcagtaggttgatgtggtttcctctgcagtgatttttctaggaagttcaaatttgacagcgagttcagctcagctgtggccctctgcccttccagctgtgcctagcaagcaaaacccaggaaagaagcagaagcctcctggccttacatacagaatgcctggacaagagagaacttgctgcgggctgctttgtattttaaaacacagcttgagagttcagagttggtggtttgctcacttaactgttgttaagatggcttgaaaagtttcattttatacactggtaccctggcttgaaatttttccactttggttatctatgttactatattatatatttataaagttattttaagaactctaaactacctgctgttaaaagaatagatggtgtaattttttcctggtttaagaaatgtattgttaaacttttctaagacagtcacttttcaaggaagagggctttcacttttgagtgtgtagttgagtgagcaggaaaaatgaatcttctacccttctcccacaatgtattatacgctctttaagaaataataaatcataagtataagggtggggtggcttatttgatgttcagttttatattataaccctgggagatacaaagactgaagctcttcctcctcttccttttctcttcacgcttctttacactattgccaaattataaaacttggctgaccacgttgaagtgaaatacttattaagctgctatgaatggtaacagtatgataaaattcatgctgttattaggttttctccttccaggtggttgaagtgaaaaatctcaggtgtagcaatactctgatttgttaaatgtatccgtttcattatttggaactctgccaataagttagttttcagcagaattttgtatttatgt

SEQ ID NO: 849 - protein, 863 aa, Homo sapiens
MADGGGPKDAPSLRSSPGPAPRVPRAVGPSGGGGETPRTAALRFDKPIKQAFYNTGAVLFVCLCCGAAVLVYFIAFLRPLLWAVLCGTFLHPFKSSLTRLGRHWLQRLHRAHTPIVLAALLLPLCFVDYGVEALGEQALRRRRLLLLLGAGGPLLYGCLGSYLGVQVLLVHAATLICRGLDYFSSLWIWTLVVGYVLTVSFKWNASTERYLRAVSIPVWIILLFHLASLAGSWRIPVFLVIVFLMSVGTLYEKQNGKESSGAELPGQVISMAASTLANLAISITGYESSSEDQPSTQPAEAVDRGESAPTLSTSPSPSSPSPTSPSPTLGRRRPEIGTFLRKKKTSDIYFVSLVWAIVVMQIWLNLWIVQLLPVPIAVWILKKLVIHFGVVDFLEKRYHVWWGIIESFLKERQGAPWPIVGLGKFLLKVDSKLWHWLNKKMIIWLEKMLDKIISIFIIFLLVIGTLLLALLLTAKVHQESVHMIEVTSNLINETLANHPEWANWLPEAQVVQRALNSAANNVYQYGREWITHKLHKILGDKVNNTAVIEKQVLELWDRLYHSWFVKNVTHSGRHKGQKLHVSRQNSWLGDILDWQDIVSFVHENIETFLSISLWIVMSRNVSLLFTTVTTLLTILFYSGTALLNFVLSLIIFLTTLFYLLSSSDEYYKPVKWVISLTPLSQPGPSSNIIGQSVEEAIRGVFDASLKMAGFYGTWLTHTMFGINIVFIPSAAILGAVPFLGTYWAAVPAVLDLWLTQGLGCKAILLLIFHLLPTYFVDTAIYSDISGGGHPYLTGLAVAGGAYYLGLEGAIIGPILLCILVVNIYSAMLVSPTNSVPTPNQTPWPAQPQRTFRDISEDLKSSVG

SEQ ID NO: 850 - DNA, 114454 bp, Mus musculus
  misc_feature (1)...(114454): n = A,T,C or G
tgccttagctggaatctataatcaggcaactgactatttttgagctaggggtctctagcccaggctggcctcatccttaagtagttaaggaggaccttgaactgtgagctgctcacctccaccctctgagtgctgcaattacagatgtacaccactctgtctggtttacagtgttaggaatggtatcaaaggtcttgggcatcctaggtaaacagtctatcaactgagctccatgcccagcccctgactctagttttctagagtggcctacagcccttgctccactgtttagagttacacagagtaaggagttgtgccatatctagactcccggtctgtgtagtgggggctcatctgtggacctgcagaaccttctgtcacctgtgttagagccctcaggaggaagtgagcagaacacacaggaacaggcaccatggctctgagaatgaggaattcagaggcttggggaagaagccagaactttgccctcagaacccagagataccatccacttctcctctgttttagaacttttcctgcacacttacagccttttccttattgctatctgtggtagtttgaataagaatggctgccacaggctcacaccataggagaatggcactatttgtgaaaagtcgggggctgtggtcttgttgaaggaagaaggctgtggtcttgttgaaggctgtggtcttgttagccgcactggtacaatgggaccgtctgtgctggttagtttttattgtcaatgtgacccaaccttgaatcaatggaaagagggaacttttttttttttagatttatttatttattatatgtaagtacattgtagctatcttcagacacaccagaagagggcatccaatctcattacagatggttgtgagccaccatgtggttgctacttggggtgggctttagctttcaaaagccccccaccccagctctccccacccacctctgcctacacatcaagatatagctctcacctacaactctggtgccatgctctctgccatgatgataattgactgcacctctgaaagtgtaagcggttaagaagtctggtgtgagcaggagggaatgaaagcacctcttgccaagtctgacagcctgagtttgaaccctgaaacccatatggtaggaggagaggaccagttcctataagtcgtcctctggttgtcacatttgtaccgtggcacaatcacagacacatacacacagacacagacacacacagacacacacagacacagacacacacagacacacacacacacacacacacacacacacacatgactaatagtaagcctgtctggcattagccgcactggtacaatgggaccgtctgtgctggttagtttttattgtcaatgtgacccaaccttgaatcaatggaaagagggaacttttttttttttttttagatttatttatttattatatgtaagtacattgtagctatcttcagacacaccagaagagggcatccaatctcattacagatggttgtgagccaccatgtggttgctgggatttgaactcaggaccttttgaagagcagtcagtgttcttacctgctgagccatctctccagcccgaaagagggaactttaattgaggaatttcccagatcaaagtgatctgaggctataactgtgagagtgtgccttcacgcatgagtgaagagggagggtccagtgcattatgggagacattatccctaggtaggtgagtcccggcagaataagaaatctagctgagcaaaacaaaaggctaaacaatgaacattattccttcatggcttctgtttgagctcctcaccctgacttccctcaatggtggactgtgacctagaagactaagatgaaatatatatataacctttcttctctgatttgcttttggccagggtatttttgccacagcaatagaaagcaaagtagacatcattgaaggctgggcttttccacttacacgtacagctatcctcagggtatcagggatggctccgtcaggaccacaggatggctgccgtggcaccaggcatcagtctacacaggactgcatttgaaaggaggagacctggcatgatacaagcaagaaggtaatgaaacatcgtaggagactgatgacagggcagcttttggttttagctgggaatggcacccaggctcacacatgctaagaacacattcttttttaactgtttgaggatttcatatatgcttatactgtgttttggtccactcactcccctcccctttaacgccttcatactactccctcccagggttggttgtgtatttgttttgagagtcactgaatccactcagtgctgctagttgcgcatgggtcgcctcttggggtcggactgcatcgctgaaaaacaagcacatactcttaccactgagccatagcccagcttcctagctttatctaaagtagcctgctctcagactcaggcgttcaccaacatgaaaccaagcagagaagagtactggctgattgacatccaccaagtggcttagtacttctgggatggcctcacctcttcattcataaagcgaggaacacagagtagatgcctcttaaaaacataaactttcccattgcttttatttattgtgcatcgtgtgccccggcgtgtataatggggattataagacagcctgcaggagtcagttctctccttgttccacgtgggtcccaggggttgaacttgggtaatcagttttggcagcaagcgtctttacccccctgagactcttcctgggcctaaaacataaaattaatgcaacagaccgtcaaggtttgcaaatcataagtggtctacttaaagtcttacaaataggggctggagagatggctcagcggataagagcactgactgctcttccaaaggtcctgagttcaaatcccagtaaccacatggtggctcacaaccatccataacaaaaatctgatgccctcttctggagtgtctgaagacagctacagtgtacacataatcaatcaatcaatcaatctttaaaaaaaaagaattcaaggttctttaaaaaaaggtcttacaaataacaacctgatggttcaggaactgaatgttatcggtacccctagaactccctttaggtgtaagaaactttctcttagcactatatgttaattttgcctgctttgaattttatataagtagaatcacatagtagatattcttttgtgcctggcttttatcatcattataattgcgagactcattcatcatgtattccttccattgttatggatatgtaatatgttattattcaaatatgccatgtttacttatgcattacagtgttggtaagtcatgtgagctttttcctagtcttagctgccccgctttgtatgtgcgtgtgtatatgtgtgtgtgtgtgtgtgtgtgtgtgtgtgtgatatatgagagcatgtgtttatggaggccacagggagacatcaggtgtccctgttgtatcattcttatctgattctcttgacaaggcctctccctgaacctcgaaccagccgcagccagccatttttactctcatgcctatagtgtagggttataggtagcacacagctgggttctaactcaggccctcatgcttgtgcaacaaacactcttattggctgagccatgtctctaccacaattacctagtgttgtgattcatcttctggcaagtatatgtatgcctccctatgcctgcccaacatctgtccctctttctctgcctcctcctcatctcttgtccttctcctcctcctccctctcccccttcctcttctcctctttcctcctcagattttttttttttttgagacagggtttctctgtgtagccctggctgtcctggcactcactttgtagaccaggctggcctcgaactcagaaatctgcctgcctctatctccccagtgctgagattaaaggtgtgcgccaccacgcccggctcctcctcagatttttgatatagggtttttctatgttgtcctgactgtcttggaatttgcaggcaggcctcctacctctgccttctgagtgctggaattaaaggtgtgtccccaagacccagaactttctctgttttgagacatcatctccatatatagcccagactagcctggaactcactttgtagtccagactgttcttcaactcataatccaccagccacaggcccttgaaatcatagccttgtgccactacacctagctgtaatacttattcatatgttttctgttttataggggtcatataatgtgtgagagttcaacttttagatgctttttagcgacatttcctagtgatgagcctcaatacacacatgcacatacattgctctcatactcacacatgcgtgcccacacatgcatacacacacacacacacacacacacacacacacacacgcacgtgtgcagaggggcagctaaaactagaaaaaaaacctcacatgactcttaactagttcttggctaaatagacgtttgagtcatagaagatgtcatcatgagccatacccactctaaccagagaatcactgctaatccaagtcaatgtcagcatttccaaatgcttgttagctccatgacttctccagcctagactatgctgagcagtcacaacaaaggagcacacgtccatccctacctcactcccagccaacacttgcttgaagagagctggagagcagagagccttaggttatggcagcaaactgcatttctatggccagctgaggcccgcacctaccaagagtctaccgctgagttctagaaaatatcctttcttttgtgatacactccacaagctgagatatggaaggagttgactcacagtctagttcatctgaatgttcccacctgctctctctctctttgtgacagggtttctctgggtaattctctggaatttgccttttagaccaggctggctttggactcatggagatctacctgcctttgcctctggcgtgctaggattgaaggcatgtgccaccaccacctgacttcttctaaaatttaaacctgctaaatgttcaaaccaaacaaaccaccaccaaaacaagctgtgatagtttgagggtgggtctgagatgcagctcagttggcagagagctttgcctagcatgtgggaagcctctgtcccatctccagctcctcttaaaccgcgtgtggttcaagtaatccagcacttgggagactgaggcatgaggatcagaagttcttggctaaatagaagtttgagtccatcctggaacacatgagatcctgtctcaaaaaatgcggggagtgggaggggctggtggggaagagtgcttgctggaagacctgagttcagcacccatattaaaggtgggctgagtgcctgtaacctcagtgctggaggtgggcagcacaggtggaccctaagagcatgctgcccagctagcctggctgactgacatgttgggcttctagttccctgagagacctggctcacgagagtaaggaggaagacacctgacatcctcttctggtttccatgtttatgcacacggatacatgtaaacctgcacacatagacccaaacgaaggtggacttctagcctccccccccccaccctactctgtgcttctgtgtgtgtgagcatgtatggaagcaggaggtggatgttgggtgttacctacaagcaattactgcatcatcattatcatcagattcttcttcttcttcttcttcttcttcttcttcttcttcttcttcttcttcttcttcttcttcttcttcttcttcttctccacctcctgccccctccccctcctcctccccttcctcctcctcctcctttaacagagtttcaactttaacctggagctcagggatttggttagcctggctggccagtcagcctctaggatttccttgtttcccctgctctgctgttgcatctgacttttttttaaaggatttatttatatttgtatgtgtgtgagtgcctgacaccaattgagactagagaaaaacatcagatcccttggaactggagttacaggtagttttgagctgccacatgggcgtgcaaatcaaacagggtcctctgcaagagcagcaagtactcttaactactgagctgtctccccagctcctacatctgggatagttggatctgaactcaggtcttcatgcatatacagcaagcactttgacccaccccaccacagtgtttagatatggacaggtaaaatgatcctgtcattcaccccaaaactcatctgctgcctctgaaacgcgatccaatttcttgtctgcaaaactcttccgattctggcttcaagcagatttgcttctttctggggatgtcaccagctgaattaaactgcccacacaaaattctctctgttggggttttgccttctcagctgggttaccccccccttgtttgagtcagccttctgtggtttgttacatgtcactctgaatgtcctctgaaaacctcctttgtcctcaccagtcatccactttagaagtggtggcgttattttgaggcagggtttgggatgccatatagaataaagctatgattgtattaaacgccagcggaggataagcagctaatacaaacaccaagcagtgtgcctaagcacctgctgtaccaagggagaagatgggacaatgccttgtcggtactgagcactctcatgcagtcctggcagagttgccagtaagggtgacatggttcttctttggcaaaatactaaattgtggggcctggggccctatctcctgataggtcccaggcttagtgcctgccactccgtgtggatgggaaagggcccatgcgactgggtcttgcttcaaaggtggatagtttattctggggcgagtatgtccggccatgtcctgaggaacaaaatgggttgggggtactctgaaagacatgctctactgtgggagttaatcatatatgttttaaatcgagacagggactcactatgtagccctggctgtcctggaattcacttatgtaggccaagctggtggtgatatcagtgaggcaggctatagcagagttggtggtgatatcagtgaggcaggctatagcagagttggtggtgatatcagcgaggcaggctatagaacagttggggacatctctgctacaggccccagatgttctctgatgaccggtttttttttttttttttcaacttttgggtcggtgaagctagtggcttggtgagttaacacatcataaagatttcatttgatagtgaaaaggaagttaggtcagacacagagattagtaatttgtgactttttgtttttttaaagagagaaacagggtttctctgtgtagccctggctgctctggaactctctttgtagaccaggctggccttgaactcagagatccacctgcctctgctggtactaaaggcatgtgccccacccttagcaataaatgactaagggaactaaagatagataaagatgatctgcaacattctaacactacaagtttactttgtggaattactttgtgcagttcccaggatgtttggggattgtcatgacactgggatatcccacaaactcccgtgtctttcacagaactcagcctcagaaattcaaatttccctccatacatcctaagccacatcacagccttttgctctgagaatcttgccgggcttcctcttttctaccaccttgcactagacacagagtcacatgctcggggacttgggttatttcagaaactgttcttcactgtaaggagcactgaaatgaatcaggaaatggtggacggacaggcaggcctcagctgaaaatgaacgctggaactttccaccaagattatttcccatagttcactttctttagttttgatgactacctcttcttggatcattgtggtcagatgcctctgacagaccaggaaagtaaataaagaaactttccctttaggaacctggtccttccttccttccttccttccttccttccttccttccttccttccttccttccttccgtcattccttctctctctctgtcgcttgctttctttctttctttctttctttctttctttctttctttctttctttctttctttctttctttctcctctctcctcctcttcctccccatcctctgtggggagacatgaaacagtttcattctgactcaaactaaggacatggagtttggaatgcatcatataattaaggatattctgtggttgtcgtttcataagaataggagagaaaaacctgagggcaaaggaagggagttaacatttgaggagctcctaacactgagcaaaggcctcaagcctgggagtcccacagtgtctcatggatggccctctgcgtccctctccctacctggcaggctgggagacagttttattttattgtgtgcacatgtgaggggttagagggacaacgtttgaggagttggttctttcacttcacctcattgtcaaatctaggttctgtataaaagcagtgttgttttaaaaattttatttatatgagtacactgtacactgtcgctgtcttcagacacatcagaagagggcatcagatcccatcacagatggttgtgagccaccatgtggttgctgggaattgaactcagaacctctataagagtagtcaatactcttaaccactgagccatctcttcagccctacttctgtgaaatcttaagagcaccattatgttgaggtggcctaattgtttaaataaataacaatattcaagaagaagatctgccagatatctatagatcagtcgtttctagttatatttgtattgtttactttaatgaagataatagggtatgcaatagttttaggcagctcctagatataaatgaagtgacaattttgcccaactcaggagatcagaccctagcactcccatgaggcagatacagcatttaaaattgctgtttagtgccctttcaatattattttcccaaccaaggcagactgctctggaggagataaaagacaatggatactgtactaagggctcaactctttggactacgtcagaagggggccactgaagttaaatgagactctggtagttattttgggttggtttcaattctgcattctacatgttttgtttttagagaaagtgtgacagatagagagagacctttgtgaatcccaatgttaaaacctgtcaccattttttaacaggaaaactggacaaacctaagaagttcaaggactggaaaaaatgtctttcttcacagtgagccccacacagtatttacgtgtttgctagatgggcagatgaccctctaacttgaccttcgagactgaagcgccagtgacaggtaagtggaaaaggggacaatgatatactttaaagagctggaagtaaagcccagtctatctccaccatggcagcgaataaaagctctggagaattcagttcggcccgaggccagtataggaaccatcaatgcgtgaaaaacaactaggacctcacggttcttgcagacctggttggctaagtgtgcacgtcaggaccgtaaatcatttgtagcacacgctatttacggatgctcatgcttctgaggtttcgccttacataaaccccgcttagctgcagaagccagtcggtatggggacttcagtgtggagttgaagacataccacactgcctctttaaatgtccttctagtttttctactggatgttctctagttcctctgagccacgtaaccctttacgatactaagacacgctccacatttttatttctttctgcgtgtgcagtgtggctggaagatcctaactcacactgatgctttctgagcccccagcgaagctgccagtgggcgcacttcctgccgggaggtgggcggggcgggccgcctcctccttcaagctccgccccaccctgcgtcccgccctccctcccggcgggcagaggctccgcgggggcggggctgagagccgtgggcggcgtggcgctgctagcagggcgcagggtcggaggtgctggggtttggcgcggcttagcccacggagctgtggtgtaacgctcgggaaagctcagcctcgcgggcaggagaagcatcgggcggaggctgccaccaccagctagtgcagggcctcgggccgagtggggcggagagctgcgggagtaagcggcggcccgggtcccgagcgctgcgcgccatggcgggcgggccccccaaggccctgccgtccacggggccccagtccttgcgcgacatgccgcacccgctagccggctccagcagcgaggaggccgtgggaggcgacagcacgcccagcccggacctactgatggcccgcagcttcggtgacaaggtggggcgcttggggctggggactcctggggcggagcgggaggaggatggatccaggaccacccctgacactgggccgcgctcatcctggcgcccctttcccggaggttaggcgtgctttggccccaacagcccttggccaaagcctgtcctctcactgcccccgcggggtcgcagctgcaggctaagcggccagagggcatgtgttttccctggctgagagtggccccgagcgcgggtgacagctggtggggaggggttcgggttgcagcaagcatgtggggacccggggcgtgtgctgcggtacttcgcctctgtgtcccgagaatgaggtccctcacccctctaggtgcattccttgaagaggagctgcagaataggaataacttgttggcgcctccagtttccccggactgcaaaaaaaaaaagcaagagttaatggctaatggttttccggggtgggtctgagcagccttgctcatcttctccccagtcggtcatgtggggagtgatctttgtttaggtttgctgtttgccccaggagtcacctgactccgacctcagcggcggctagaggagagtctctggttttctgtctagggcttcattcacctcttatagcgaaccacattgattaggtttggcagtggctggttttgtggttgacggaaagcaagctcgccctttgaccttctttgtgcagagggaggctcttggtcgttttgctatactctcctgctgctttgagagacagcaaagtcccgtggggaggaggaagagactgcatctcccccctccccgcccccatctccatttcagctgtgaccaggattttgagcagcgattgtatctgcgctcctgctgccacttagtcacgagttgcagacattccaattgttcttagcacttgagatcagggtctcttcctcctattaaaatagtaaatgaattcttcctttccgtagtattaatggaatgagtggaattgggagacttaactttacttcttctcttagatgggaaaggcatgtgggaggtaacatttcctatgggagagtgtgacttgctgggcctaagctctcagaatgaccgggaagtgatagggatttataaagcctaaactaatgaaatggatacattgaacagctcaaaatatgttcttgcgttcacactggtacctctgtggtcattgctttttatagattttaagattatgtgaaaacataggcagcttgcaaaccctcccttatgtttgacattcaaagagtgatcattgaatgcctgaatgataatttttttcttattattagcagagacattgattttgaatggatgtagaatgggaactaaggttaattctcagttctctgaaggaaattgaattatttccttactgctgtgtaagaaatcacttcagaatttagcacccgaaaatgctgtctgtgagtcaggaagctgggaggttctgagtaagacctacaggatgctgccatcatctgaaggctgggttgggagtactctaacgtcacttctaggctcactcccatggttcttcacaggccacagtagaaaagatgatccaagacagccccatgctccagccatccctataaatattgatcctcaaagtgacatacctctgctggattctgttgcttatagagggacactgacacagtgtgggaagagggtatgaatcctagagaataccaggaaatggagatcactgaggccatcttggagcctggcttctagtctaccgtgcgcgtgcgtgcgtgcgtgcgtgtgcgtgcatgtgtgtgcatatgtgtgtgtgtgtgtgtgtgtgtgttatgaattgaacccgtggcacgtgctctaccactgggctatatcccttgcttcacataaagctgttttgaatatttgaatatttccttgtggtccagtcttggatagttaattcagaagtgtggccagtttactagttagtagaaggtaaatgctctgtcccactaagatctggttggctggcagtaaggcccttgcctgattatgtatggtctccttcacaggatctattctttgagagtcttgaaggcactattattaattatttaacattaatttaatacatatcctaacaactgtggagagcatctaaatgacccaagcctccagggcccaatttacagtcagccacttttcctcagaggctaagacttctagtttctctccgattgcgagtagcattctcttattacatgtatcctcatacaatttttaaaacaagacttattttgtacgtgtatgtgtctgggtgtgtgcttctgtgtgaatggatacagggtgtgtgcaggtccttcagaggccagaagggggtgttggtttgcctggagttggagttacaagctccgtgggcctcctgagaaggaggctgaactcagttcctctggacgagtaggaagttcttaaactgctgagccatctctccaacccctcccaaatattaggaaagagatgccagccagctgcagaaatgaggacagtttggggggagctcccttgcccaccctcaccttgtttaggtatcataagtgcccgtggagggcaggaggtagcatcaggtgctgtgttcagtcttgtgagaagaggcctttttccctgcctctttagacattggggtttcatcccagacaaggatttagggttggctctgggggggtgaggggcatgaaggcgttggcaggctggagacagtgtcaggttattgcccagaagggagttgctttctctggcttcagatggcgttgctagctagcagtgtagctgacacttccgaatggccttttttgttctgggtgtaggaaagtgtggtgggtgctccatccacctccttctcacactgtccaaatcgcagtgcagtgggaagaattcttgtctactgagggctggatgggtgtgtccttctgatgctacccaaacccaccaggctatgtatcccttcattttccccctccagttaaaatgtaaataaaaccacttgacctatttctgggctgttttacctttgtccatgtcttctgagcagtgtctctgtgattcagcctcctgcctgcgtgttcattctgaaactgaatacttgactcctctcagcctccagtcctcagttaggacttctccacacacctccaccttcttcaccacctacttcctgaccttcctgccaccgaggtgttgctttcttttacatttcaatcattgagtttgggaaatccagatcttaccctgtcatctttgatagcttttctttaaacctttaactttctaaaaaattacatactgtatgtgcattggcgtttttcctgcatgtatgtctgtgtgaagatgtcagattccctggaactggagttgcaaacagttgtgagctgcccatgtgggtgctggggactgaacccaggtcctgtagaagagcagccagtgcttttaactgctgagccatctcttctagcctcctaaacctttaacttttaaacccagtgctatacagtgaattcaagactgaatagccaggagaccctgtcttaaaacaaaccaccaccaccaaaaccccaagtagtaataataataataataataataataattccatatttaaataaaacgtgctaatatagtggatcacagagccagttctcagccgtctgcgagtgcagtcttgacttcttcctgctcaagaccttgtactgtcctcatggcaggcagagtgaaggccagtgctccccagggtccttccaggcccacagaatcaggcgattcctgactcagcttgccttcttcaggcctctctccattgtgccctccacctgacattcatccacttgccacttccctcatttccttaagcctattcaagtctcaaattctcataaaggcctacccaagtccggttcccatcagccagtggtcccgaagtccccttcctgccctgctaccttccttctacaatacctgctgcagaaccttgaagattctgagaatggggattttgcagctttagtaaataatcttggttcctagaacagtgcttgactccccgaactcttttctggatgaacagaaagaatgaagcgtgcctccaaggggcagcgtggggccactcggatggctgagagcttgcctagcttgtcctaggctggagttcagaccccaccagagatgagcagggcatgatggcagtatacaactgtggcacccacactgtgctacactgggaggggaggcaggagcaggagtttaagatcatccttggtggagagttcaaggccagcaagggaatgaatggggtttggggatgagcagatggctctgctcagaaagtgcctgcagtgcaagcatggggacttgaactcgggtctcctgcatccatataaaggacagttgcacacatcagtgactctgggaacaggacaggatgatctttctgacacacagccagtctagctgaactggtgaactccaggttcagcaagagactgtctcaaaaaacaagttggagcttgctggatgtactggtgcacacctgtaatcccaatactctggaggccgagactggtggatctctgtgatctggaagctggaaaccatagtggtggggaccgtgactgaggacatccgctgttaacctctggcccccacactgcacacacagacatgtatgttcatcattcttttatttatttatttatttatttttggtttttttcgagacagggtttctctgtatagccctggctgtcctggagctcactctgtagaccaggctggccttgaactcagaaatccgcctgcctctgcctccggagtgctgggattaaaggtgtgcaccaccacgcccggcttatttttttattttgagacaggttcttgctatgtagatctgctgggctggtcttgaactccctgcctctgcctcctagtgttagggattaaaggtgtggatccccacgcctagctatgattgttaatcttttttccactgatgtatgtggacgcacttgtgtgcatgagatcaaagaacgactttttgagtcccttctcccttgcctctttgaggcagggtttcttgtttctgtggtgctacttaatccaggctggctgggctgtgagcttctgggccattctcctgtctccaccctcacctccaccccctatctggaggtgctgtgatgacaccaggtgagagacaccaggctttcttaagtgggctcctgaggatcgaattctggctatcggctggcagaatcagtgccaagtgctttttacctgctgagccattttgttagcccctagttaagattcttttaaaagagcataaaacaaaacaaaagagcaagctggccttaggaaagtgtacaagctttgctattgaagggacccagatacttttggctttaggcatggctaggataggtgctgatgatgttgggaatctgacacttgcaacaagggtccctctttctgatagtttcggcaaagctctgtcttggctggaattgggtcggatacccacacccatgcttgtgactgatcaggcagagctagctagaatccagctacctttggcttgagggactttacaaagtgaaatttctagatacaaattaagtatatctagaaatgtgcctgtggaatgtgaagagttagacattacttttgtcagtggagggatagatcaacgttcatgctcctaaccctacatgttaagacattggatattactaatattttagaagcacctccatgatcaggcaggcagaagatgacttccaaagtcaactgggatgggagaatagctcagtggagaccttaccgttgtgcatgagaccctgtgcgtgacttcccagtgacacacacacacacacacacacacacacacagagagagagagagagagagagagagagagagagaagaggaaacattaaagaagaatgtttctgttaccagagagaagagtgtattgggcaagaaggaagcaatgaatattcactggagatattccactactttgtcatttgatgtgtatatgtgtgtgtgtgtgtctgtctgtctaattgtgtctctgtgtggtcatccttggtcttcttcagtaacactccactttttttttttataaagatttaattattttatttatataagtacactgtagctgtcttcagacacaccagaagaggacatcagatcccattacagatggttgtgagccaccatgtggttgctgggaattgaactcaggacctctggaagagcagtcagtgctcttaaccactgagtcatctccagcccatacttcacctttttaaatttagttttgtttttgtcagatggtggtgacacacacctttaatcccaggatagccagggctacacagagaaaccttgacttgaaaaaccaaaagaaagagaaaagaagtaaaaaaacaaaaacaaaaacagacagggtcatactagtcaggtctggttgtcttataacttactatgtaaactagcctggcctccaactcacagagatccacctgcctctgcccctcaagtgcagggactaaaggcctgtgccattacccctggcctctccttgtttaataattaaattttattttatatgtatgcatattttgcctgtttgtatttctgttttacgtgtgtgcctggtacccaaggaagtcagcagagggtgttgtcacccctaggcctggatttacagatggttgtaagctgccatgtgggcgctggaaactgaaccctgggttctctggaagagcagccagtacttttaaccactgagctatctctcaggtctcttaacatttttaaaattattatttcatctcttattttcttattatttaccttatggtcctggacttagctagaatggctgtccagtgaggaccgtctgtcccctgggttacaattagatcactagttttgagataatgccagttcagtaatgtactaggcaaactcagaacaatcaagatggggtacatacacataataaaaaagtctgtcacagcaaagcagacttagattgatacagtattttggctgtagagaatggtgttgcagtgaacagagagttagtgagaacaggaatttttttttaacgtttcttctttcctccctccctccctccctccctccctccctcccttccttcttttttatttcttttttgggtgacaggtttttgctatgtaaccctggctgtcgtgggtagacaggctatgtagatgaggctggcctcaaacttagcgagatctacttgcttctgtctcccaagtactggtatgaaagtcttttgattccacatctgagtcaggtttttagtgatactgggatcagaggtgtgtgccactgtgccttgctttgttctaaaatcttacaaatcataatggctaacttttcagatttggggtcatttcccatcactttttagactttcatagtttcaggttagggacgttcaacctacagtgggctactgcaccttagagaatgctgagtgccccatttaaagtgagaccactggggtgagatgtctgtgtaattaatcccccgcatccctacagcaagctagggggcagagaagacaggagactcacctggaacctggagggtcagctagtcaggagtacagagtggcagaaacagtagagaccttaacacagtggaaggagagaaactgctcctgaacgttgtcctctgacctccacacatgtaccatggaatatacacgtgagcatcctcacacactgaaaatgataaagttaaatgtaagaacatctttataacaggaccaaaatttagttggagaaatggaggcatcttaccattaactttgtccaggccacagagttaagtaccagtcacatccactgtaactatctgttggtgtctcctcactggacagggaacactcaacaagcaaacctctgtttaccttcacttgtacccgaagcatccagcccagagcctggcacactgcttaagagataagagtgtgataagggctgcagtgacctctacagataggtcacatgctttctgggctctgtcagtcctcaaaccgaactgctgaggcgttctcctgaatagccctggctcctgactctgccctctgtacacacaggagaacacacgcacacacgcatgcacgcacaaatgacactgggtttcattggctgctctggtggtcaaatgaaggactcagaggctgtggttagcaagcttcagtgctcatagatcgccagtgttccttggccaagctgatgtctctgtactcattttgctttgagaagctcttgtctatcatggaacatctgacttccctgcagctctcaattcccaggccactttggtgtcctgtcttccctttactgccaacaaacaccctctgtgtctaagctctgatttctttttttcttgctgtgcatccctagctggtttgctacttgctgtgtagcccaagctagcctacaactccctgagacacgttgcctaagttctaagctcagcttctccatcctgcagtgcccttcattcatccggaactcatcctgttcagatcggctgtgattgctcatttgaatgaagtttcccagggcagtgttcatctgagcaggtttcctttcagtggcgagctttggacaaactctgccctgagataactcattaccgccccattttagtcttctaagcacatcaccagcacccttgctacttagctgagtcctcctcctccgggatggacagatcattctcagtcccttggacgaggatgccagtccctacttcaccaactagagtcagctgaatccttgccaatccttcctccccaggaaacaagaaggaaagagagaacagctaacacgcatatcagtgcactgagagggcctcaggcccttcccacccatgtcctctctgaccatcctccaccttaagatgctcaaaatccgtgtgcgtgcttcagactcttagtcatttactgctagcactgacagttctccccacctcccacctttggagctttgcccaagccacttaggaagtggagctgtcttcacacccccacttgactcccaaaagcctccttaagcctcaaggaccagatgagcacatagtgcctgctacctaagcccacttgtagccaagcacaaatacctgaataatgggactcacacactagctttggacactcccaagatttttactacacacacacacacacacacacacacacacctattagccctggctgccttggagctcactctgtagactaggctggcttcagagatctttctgtctctgcctctctagtgctgggattaaaggcgtgtgccaacacagcccagattcacttcctattttaagctgattttttttttcttatgtaaagcagtatcaacagaaggaaactggctcccaggaccaggaagtcatgctaggtgctaaacaagctggctccagaattcaaacggtcttgccttctctttctcttctagtttacttacctctgacttttattttattttgagttgggtctcactatgtagctttatttgtcctgggacttgctttgtagattatactggtattgaactcacagagatctcccatgcctctgcctcccaaatgttggggttaaaggcctacgccaccatgcctggctctgacttcattcttaagtaggcaatagaatccaatccaatagaaagatatttccatcagtatctaataaatcttgggaaagactaggggttcccccatgtcacctgcccactaaggactgtattttggtattagaagaccttggtgaaaggccagaatacaggattaagccagaggtcaggtcgctcccccgccccccccccccctttccgagaagctggtcaggctgcttcctatcctgagaggaacagccctgttgctcagctagagtccacagaagtgactggattctactaaggttaaggtcaacttcttcactgaccctccagtcctgaggacgatgggagcttctgttactgctgctcttggtgacatcatcatgcccctcttggctcctcaggtttctcatcacctaggcaactaattccctgtacttcaagtccctgagattgaagtaccttctgtgtttttttgttttctaattggaccacgacagatgaatatacaaaaatggagaaagaaaacgtggaggaacatatcaaggaataagaaaagctaccttaccatccttgatctcacattaaccctgggctggaagtctctctatgaccccttttacaggcgaggatgcatcaaagccatattagtggagctgagattcaaagcaagcacctggcctcagagcacactaacgcagggagctgagcaagggcttagagctcaagggttctcaggagggtgggtgggacctgctagaggccagacgagataaggactgggaagcgtttgcgggatttagcaataaggaggtcaaggaggaccctgaacagcaaagccagaaaacaggtaacaggaggctggggagtaagccagaggttacaagtactgaggacggcggcatgacttccttataagtttcttttcgaagcacaataacaaaaagtacatacatatattcgtgtatgcactaagtatgagatggagagaaagaccaccacggaaatattttcttcactcttaagtttgaggatgttcagatgtagatggaaatgaggcagttgggagtgtctgctgccagctttgtttactatggcaaagttccccagagacaacgtgttttatcagaaaagatttaagctaagagtatagccgagtggtagattgcatacatggatatacaaagctctgggggaatcaatgccacacacacacacacacacacacacgcacgcacgcacgcacgcacgcacgcaaggtttaagggtacaacacccacctctatcagcttactgtggaggacccaggaaacacagcctgtcctttctaaagggaggagacttcggcagtcactcagctcttacatgtcaccatcctgcagtactaccagtctggatgtcaagttctcagcacttgaactttggaggttgtggagacacagatcatattcatactgtaggagagaaagactcaggtgaggaagagagtgtctccaaaagtggactatacccaggattggccatatcaactcctactaaaacaggaaaggaaggagggctacacattccgactgtgtaacttagagaggtctatcctatggctctcaggtgtggttgaggtcatcagtagagggggaaggtaggggaagggcaagaacgtgaggggcaggcagaagccttcggtcagctgcaggggcgtgcgagggctactgtggaaacagacacccagcacctgtgagctacgcctgtgatgatgctccagctgcctctgttctctaagactttggggaaaggtgtgaacaaagaaccaaggtaacagtgaaacagggcagctgctgagctgggcctcattacataaagcagatggggctgaggctgtcgttcagtgtagaacgcttgtctaacatgcaggaagccatgggttcaagcccccagcaccccataaaccatgtgtggtgacatacccctgtaatccaagcactctggaggtagagtcaggcagattagaagttaaaggcagcctcagatatatagtttgaggccagcctgggttacatgataccttgtcacagataagcaataatacataaatagaggcgggtagagatgttggagctgcagctcagggcccagcagctcatggtaggccctaggttttctccctggtaccacaaagggggacacaaatgaaaggaggggagggacatgaggttgagaagcagcatccgtcactgctaactcagatggaaggcaggagagtagggcagaccacgtggtgggtgtctgtggagtcagtggaggtcagcaaagccaccacaggacacaggaaggtggtgacacctatgagacaccatgtgtttctgctgggcctgccctcctcgatgaggcctgggtcacaaagcccaattttctcttttctgtctcctttcagacgctggccagaagctaagtatgcttttgcgataccttgggcgtcttagtttccctcgggcaccctccccaccgtgtgtcagacctccaggctgagtaaatggagtggcttttttctttttttttttttcctctgctcctttctcctcctcctctcaacagctccgctgagtctcacagcttgtctgttcgggaggtttttcttttaaaattgtaatacaattgtgtggagcttaaaaaaaaaaaaggaaacgaagcaaatagtatggagatttctaaagaattaaaagatggagttagctggtgactcagagagccctcctcttccgacacattccatgcaaagcaaaggcaaccacctcctcctagaatgcctggactccggctacagagatggctcagcagttaggagtttgctgctcttgcagaagacccagggttggttccgagcacccacacggcggctcacaactgtctgtaatttcagttccaggaatctgacaccctcttttggccttcaagtgcacagtttgcacttgaggcatgttcgttcgtgcagagaaacacttggagactgagttagtctcagtctggtctacatagtgaattccaggccagccggggctataaagtgaaacctgtctaaaaatcaagaacatttcagaagtgaaacaggtactgctcaactctacagggagagtgtgtgactgagcagtctttctgagcatagctggacctttgtctcatactggcggcctctacaagggaaggggtgaagctatcattagccactggctgaaggctgtttgggtggtgagtttaggcattaattaacagtatttttcaaactgcctagaggggagacagagcaggttgagctggggaaacagccaggctgagaaacgcaggtgctgggttggtagttagaccagagggtgccaaagtggtcagcacgtgggtgtgctgtcgggtactggcagcacctgctatccttaccgtgaagtttatgcacagggagtaactaagaggatgtgcctctgccaaaggagcgagtttttgactcaggatgaagtaggtgatttcctaacggacagaaataagaaactcagccccccacccccacccccagagcccaaaatgtaaatgtgcaggcactaagtgtcaattggtgaagtgccatggagaggccagtgggtgatgcggcagaccattggaggaagctgttgggaggccagccaagtgctaaggaacaggaggagcggggctggtttgtggtttttaagtcctgttgatcaagcccctagagctgggagcagatggttggtgatggaggtgggggtgagtgtgtgtgtgtgtggtgcagttccacggggctcctctcactggactctgagtgtgccttttatttgctaataataggagtacagctcctgttaagtcaagcagaaggggagggggtgggtgagcctcttgacagtcacagctggaacctctgaatgccactgacgacgggtctcaccatctcagacgtgggaacgtggcagcctttgcaccccacacgttttacagccagagtgaatggggacctgccaacgctgcctggcttgggtcatgtgcggcaagtgggccctgagagtgagagggacactgattggcttaacttgggtcaatcgtctgcggctgcggaggagtttaatagctgggtctagaagttggatggattgtaaaggatcacagtgagggcatctgccagcagcgtgggtgactagtgggatgctgatggcagaatttgatgagacatataggtcagaaataaaagtataggctttctaaggcacatgatttttaaggaactatatattctcatgctatagaattcagctctgtgtgtgtgtgtgtgtgtgtgtgtatgtatgtgtgtgtctatgtatgtatgtatgtattgagacaggatctcactatgtagaccaggttatcctcaaattcccgtgagtactgaaattaaaggcttacaccatcatgcccaacatttttaaaaaagatttacttatatttaaatgtatatgattgtgtctgtgttggggtatgagcacgttcatgcatgtgcccatgaagaccagaagagggcactgagtgccctggagctggagttaccgtggttgtgagacatcaacagtgctgaacccaggtcttctgaaagacctggatgtgctcttagccgcagagccgtctctccaggtctatgatttacttgtttttaggtagagttttgcatgttgcccaggcttttcttgaatttttaggcccaagtgatcctgttgcttcagctcttctggtatttggcactatggacacatggcccaatgcctggccacaaaaataaactttttgaaagtataccatagtagttttcagtataattttgaggttgtacctgattccagaacaatttcatgtccccagaagacctctgtgccatgtgcaggcattcttgagtctcttgttcccagccactggcagctacagattcctgagtgtgtagacttgttgcacaggtgtttcacgtctgtagcatcatagggtgtatgtgcccttgggtccagcatctgtcacttactcttgatgttttaaagggtcatcatgtggagtatatgagcatttccacttgtttgtcccccaagctttactgcagtctgactgccaaatcacggtatatattgaagacaggcaacacaatgttttgacattcatgcattgtgaaaccatcacatcaagctacttaaaacataaaacatcgagctgagcagtagtggcgcaagcctttactttcagctcttgggaggtagaggcaggcggatttctttctttctttctttctttctttctttttttttaaagattatttatttattgtcatatgtaagtacactgtagctgtcttcagacactccagaagagggcgtcagatctcattacagatggttgtaagccaccatgtggttgctgggatttgaactcaggaccttcggaagagcagtcagtgctattaactgctgagccatctctccagcccggatttctgaattcgaggccagcctggtctacagagtgagttccaggacagcaagggctaaacagagaagccctgtcctgaaaaaccaagccaagccaaaccaaaccaaacaaaaagcccataaaacatctatcacttcatatgtagttaccttttcttgttttggtaatgagcagggacatttgagtattcagcaaatttcaaatataaaatacatgattatgtgccatagtgaccatgcggcatagtaggtctctctgagttaatcattttgtaacaggcagtttttgtcttttgactagtacttcctctttcccctcatctctagccctggcatcactgtccctttatgagtgatgctcatcttaaaaatataccctgtttctttatcctttcctcagttgatggacactaggttgtattaggcctgtgtcccccctttgcctccaaaaggataatgaaagtaacctatgtaattttctataatagttttgatatgtgaggtcaatggtcatttgtaaacttatcttttattcacctgatgacatctctgaggcttacttcttctgcctgctaacctaggcctaattctggaatcttctagctgccatatagtctcatctaggcctagaatgcttccagcctctgggacgtgctgctgagtaagctcgccctttctagctctttctgaactctgaatggatgatcaactcaactatcctggctcaaactcgtctcctagctgactgattcaatctggcttctctctcagcctctgaccgaattgcccagcttaacctcaaactctctttggcaatttgccctagtcttctggcttcttcctcattctctggctcattctgtcttcacctgtgtctggcttgtttcctctttagcctatcactgcctcctctttctagttcctgcactgctctcttatgtccctttccttccctttctcatgagagttgggcagatcttattctgtcaaacctttctctgattcgtcaccttgtccgccactcaactagacatcactttcaaaaatgagtgcttccttctacaaactaactaaccttcattgtttgggattaaaggtgtgtgctaagggatgagccacacaataagtagaaaacgttttttttcttcagtaaatcacaatctcagcctctcagtgtgatcaagtgttctgcaacagtcattctagctaattaattccttttcagaactatccagggcattgagcacatgacctcaccttgctaggtatatataacctttgagctatatctccaaccttctttttacttcttttttttttttccttttaaatttcaaaaccaactctgactaagttatttagaactcaaagtgtagcccaggctggccctgaacttggcagtccttctgcctcaacctctgcagtagctgggattacagcattgcacccccaggcctacccagttacttcacttccagcgtgatttctagggccttccatgcctttcttctccccatctccaaacagttttcacacatacaatacatccccattgttgttcggatcttcagaacattgtttgataaagagagactgtacttactaagtggcagctgtcaccttccctggcttgtcccctgaggacccctattttccttgtttttgtgaggtttcgttaaatagcatcttggaggatgtgaccagacagtagttgtctctttgtggcttattttacttagcagcatgccttcaaggatcgtccatgttgtaacatagacaggacttccttcttgttaaggccgagtagtattccattggacctagccactgtatctttcattatccatttattaaggaacaatgggttgtttttgcctcttggctattttgaaaatgctacattgagttgagctgggctggagagatggctcagtggtcaccagcacccacatgcattacagtgggtgtaattacatgattccaggctcacaactgtctggaagtccagtcctgggggctctgacctcggcagggactgcacacatgtggaagatccttacattctagaaatgccattcgtttagtcaggtcaggtccagacattccagcaaacagatcttcctgtagtcatagcaggaagagttgcagagtgactggtagattacagaaggggaggccaagacatccctggggcagctgagtgagggcggggtatgctaaggagaggcctgtgctgctgccgtcagcatccatgctggaaacactgcagccgagtttctgcaccatctgcccaggcagaccacgtgcactctgtgactttcatcagcagttgtacagggcaggccagcttcttgttagttcctcacagatttgtacaggacttccacgtgctgagggatacggaggtgcagcctcacagaacagccattcagacagaggaaggacaggtgaaaactgtccagttagctgatgtcgtagatatatacacggtgtgttggagcgacagactgttttttttttctctctctctttccttctttctctctctctttcttttttaagttaaagaactttaaaatttgactgaggtctttggtggcccatttcaggtagcaactacattttatatttaatgagaatttgaatggttgcttttctgctttgacaataatgagagctcccctacttttttgttttagcccttagatactcatattccccccgcctctctcccttcctccctccctcctccctccttctcctcctccactcatggtcgtgtatgaaggttagaggagagtctcacatgttgctctcaggagctccactagactggccggctggctggtgcacccagggatctcccctccctcactgcatcactgggatcacaagcttgtggtcctaagcccagctctttgacatgggtactgaggagcagactcaggtctgtatgctagcatggcagacactttactgactgagcccctccctggtctttatattgttctaacccactcgagttcattatcaccagtgcatccccatttgacaatgtagtttgtaaggcccagtgtacaattcaatgcatgccttcttttttgaaaatattaagcatggaggttagagagatgactcagttgttaagactcctggctgctcttctagagaacctgggttcaattctcagcacccacatggtggctcacaagtttctgtaattccaggttcagggcatctggtgtcttcttatggtttatgctgatacctggcatgcacatgatacacatacatatgtgcatgaggcaaaataccatgcacatacaattttaaatattagatgtgttggggtagtgacaacagagcatcaggctcagcattggactacttctaaacacagggttctgtgcaggtatgttgatggcatgtccatgaagcaggcccacatgtccttgagggccctgggttccaggtccagttacaaccattattaattggctgactggtggaccccagggaccttcacccttcactttatcactacgattacaagcttgtggccccacacccagctttttgtttctttaattccggaagcgtaggtggtatgctccagatctgtcctgcttccgtcctgtgtgtaagagacacctgggcttgccaggcagccgtggttgacagtgagggtcacaagattccttctgaagcattctctgtttgtagaagaacttaatgcaatctccctgaggcccagccttccttgagtagtgtgtgcctggtggtccttcatttccccagcctggctgcttctctttccttctgtttttgtctcttctgcaccaagtacatccagtctgtgatgtctcctttccccactgtctctcagaggtcacagtgatgtgtgtccctggaaccattgttaacactatggaacccaagttttggagggtgctctctggtgttatttcagtgaactaccccctgacatggctaccttgctattcctctctgacaacagaaagttatcattgagaggtgaagtaacatgttcaaggttacagagctgaaagagagtgaggctgggatttgaacttaggtctgttcaactcagggaccttcactaatactatatatacagcatgaccctgaattgaccgtgatgcatttcttatgtagagcatggtctttgggtaactctgcctgcatcttactctgcatcaaattcctcctcagtttctggcttttccttttttggctttaaactcacagtgtacctctctgccttgtttctaaagccgccttttgctcccatcaccatgggcgccttggttgagtggtcttggtgtactacgtccatctgcctcaccatctgtttcctcctaattcagtgtcacacccacaccagccaaggcctgccccaccagtctggctcagcagatctgtagttgtttctccactgttgaatcccaggccaccaaagctgaggagctgtggacatcgttcccactttccccaagggcttagtttttagcggagggaactgtgacctgccaaatcggagttaccatttactaccattttctccatctagtgtttaatacttgctgagtgaatggactctttccatgtttggcctgtttccttctaggctctgaggccatcctgagctctggttcctcagtttatccatttctcctgatgtctctgtctgggcttccgtgtgcagaactgcacaggagtctcacagctgcatctctggctcagtggtccagactttgaatgattcccacgtttcatcctgcagttccttatggaagaggatttcaaaccacacttctctcccctccccaacagtctcattcctatatactgttccttcatgtctgctttcatttttgttgtgactgtcaacatccacattaagatgggactgtctgtttattcagacaggcccctcatattctgagcactagtcaaattccacattcctcaaggaaggccttgcatatccattcccacctgtgtggacattgtccattcagtagtgatccgttacccgggctgactttctctggccagggatctgtttgtctctcttgttccttcctagcaaattatgctgttgccaactgattttcctcctgagctggctggcatggtatgtggattctcgtttccaagactatgataggggagtaaaattacaggcgaatgtggcctcggccatcactgtgctgtagggtcttcagattgctcttgattgcaagaatgagtggatactgtgtgaggggctttgccttaagaccccagtactccaagtggcctgtaaagcaggagcatggacactccctgggcgactgttggaaatggaaatccccaaacctcaggctgaactccagagctgcggaaccagtatttgacttagttttcttagtttgggttttgttttcatgaagagacaccatgaccacagcaactcttatccaactggggctgtttacagtttcaaaggtttagtccattatcatcatggccggaagcatggcagcgtccaggccaacatggtgctggagacaatccaagagatctacatttatttatttatttatttatttatttattttattatgtgagtacactgtcactctcttcagacacaccagaagagagcatcagatcccattacagatagctgtgagccaccatgtggttgctgggaattgaactcaggacttctggaagggctcctaacactgagccatctctccagtctggagatctacatcttgatccaaaagcagcagaaggagactgccacactcgccagagcttgagcatgtatgacctcaaagcccacctccacaatgacagacacacttcctcaaacaaggccacatctactccaacaaggccacgtctccctgtagctccacccgtatggccaagcattcagaatcatgagtctacaggggccattcctctcaaaccaccacagcatcctgcatttgactggaccctaagtgagttgtatgcatatcaaaatgtggataggatgctgggtatggtggaacacgtctgtgatcctttggaaggcagaggtcagaggatcaggagcttgaggctagcctaggctgtatagccagatgtggcttcagaataaatataaacatttaaaatactgctgcctctgcttcctcctcctcctcttcttttctctttttnnnnnnnnnnnnnnnnnnnnnnnnnnnnnnnnnnnnnnnnnnnnnctccctccctccctccctccctccctcctcgtctctcctctccaatgagcacactgttttagaacctttagagatttctttgggcactcagaccctctgaggagctcttaggtagtagtgctgcctgaatcttgagaagtttggatcccatggtggtacaaacctgtaatccctggggaggctgaagcagaaggaccatgagtttgaagccagcctggtgacacagaggccctaagactcggaatcaggatgtcactcagtgtagaagtgcatgcttagcatgtatgagggcttagcatgtatgagggcttagcatgtatgagggcttgtagcatgtatgagggcttgtgttcaatccccagcactgaaaaatgaaaagaaattagatttagacctttgattttttttctagtttttttccaagatatgtgtgtttatgtgtgtgtgtgtacatatgtgtgtgtacatgtgtgtgtgcatgtgtaatggtatgggcccacatgctgtggtgcctgagacagcttgtaggacttggttttcttcttccaccatgtggaacctggggattgaactcaggtactcaggcttggtgcctggcgcctttacctgctgagtcatctcacaggcccttaaagtcgcttaagaaaattttatggccatccaaatttgagattgcctgccttagaattctcccactcacccagagagggagagctcgtgatcaagttgatgctgtcagcttccctgttcaccctaacttaacccttacagaatttcataaatgactgatggggtacacatctgtggaggcaacctcacaacgtctatctatcaaaatcacaaacaatcaaattccttttctctctcctctacctgtgagttcgcacagaaggaaaaagctgtcctttcccccgcctgttagcatccctcgaccttgagtcaggtctgtcttctcatccttcttccgcccagtgccttgggctgctggctggcattgggttctcctccactattgcctttgacatgccagtggtgttactggttgctccactcccaaagagcctaatgccagggtccttgccactgcatcctccaggctcagacaggacttgctgatccgtccctgggcttctggagtgccagttctcctggtccctgctgtagcttgctgcctgcctgttctcagcttcctttgctgggccctccttgcttccctctgaaccctgagatgctctgggattcagtcctgacacctcttgtctgcatagtgcccttaaatgtttaggatctagctttatggctataaacatcacctgtgcacgggggagtacaatcccaaacccctcctgagttctggatccttctctctcactgacgtctgacacacagacatgcatctcccagcgggcttaactgcccacttagcttggcagtggggaaatgaattcctccagtctttcttgtattattctggtttcttaggccaacaaaaatctgaaaatgtttggaatattttaggattatccttagctcttctctctttctcatcctggcctcagcccaaaacccaatcatttggagatatatccagaaaattagcactgcttactatctacactgcagctgccccagtgcacgaagcttcatcttttgcctgatttaccaggattgtctcaggagcctcttggctagccagcttgcttcgccttctgcaccatcagtcagttgacaacagtggtcagagtatgctttcagccagcagccttgtaaacatttggagacattttagcaaccccagccctcctccatccttctcagcctccaaggtgccctgactgctttctcagcttctgcacacttactgccttgcctcaggccttttgcacagtgtgttcccttggcagagcatcctatcccagatagcactggggctcacagtttacaacctgcggcacgtcgtttaccttattcacagcttctctttctgatgtttccattacccatggttattcgtagcccaaaaatcttatatggaaagctccagaaatatacaatttcaaagtttttaagttgcactcccaacagaaacatgttaaaatccagcacttttctgcaggatcccacccagatcagggaaatctctggctcaggatgtctgtgctgggcaaactgtctttccattgctacttagtaaccctctaagttatcagttcagcccttgtttgacttaagatggccccaaactagttagtttttctttatggaaggtcaggagtttatttttgctcacagttctagagggtaagacctgatgagagcagagtggaggtagggaacaagtggttgtcacggcagcgggagcaggaggtggagtctctctggaagagagagcagcaaatggacctttaaactctgagagctgcctccagaaatacttccttccacagaactagacctcctaaacctcccagccagcactactgactggggaccaagtgttcaaacactggagccattctttttccaacagcagtggtgatgctggcagtcatattagaatatattgttgtcattgcttcacttttaatagtgattgttgtgtatgtttaggggaaatcatttgtaggtctcagggctcgcctccgtttcagcacctgccgtgggttcccttagagtgtggacctcatgggaagtgtgactgctgcggcacaccagggcccgttttgctccattttctccctttctagcctactttattttgcttaacagctcttttgccagcagatgttttgcctaacacctgtctctccattgctataaaccaaaccacttgaagactagagctttattgggtcagtttattgatgtaatttcaaggcatgaacaaaacctaggatggtataggtatacacattgttgacccagcaaatgaacatgtgctaagtgatgtccctataaagatatttgtctcagtgttatgtttaatagcaaatcaaagggcctacatagcaatcacttgtcagctgcttttgtatcccaggctggcctgaaacttggtccaggatggtcttgggttcacagctgtcctcttgcctcagcctctcaagtgagaggaccgcagacataaaatacctgggagaatggaatggataaacaagtcgaactttattcaaagctgagcctcaaacaatttatactgagggttcagaaaggtcacttgggtaaagttgtcataagttcaagctgtatacaatcactacacgtgtcaaagacatgttttactgcagaggcatatagaggatagtttaaccatttaattgaataacaacagcaggcaataatgagtaacgggaagtaaactcgctcctatcccatacaccctagaggagtacaaagactcattccaagaacaattctgttttgaagaactgaggtcacaagatgcttggagtgttcatactcagaattcccctcttatgactcccttcctgaaccatgttccagcactcaggagcaaagtgcttgctattcagtcttgaggacgtgagtttggttccccagcacccgtggtagcacattcctttaaccccagtactatgagggtggagacaggaggatccagggactcacctgtcagccaggctagccaaatggcaggccctaccttcagccagacatcctgtctcaacaacaaggtggagagttgagtttctcagcattcttgctgcccccagagtctatccaggtgtgctgggaggcctggcctgtgatgttgggtgttgttgaagaagggttttgtacaattcagagcttatctttgtagtattccagactagagagcagtttatttgttggctgaaagaggtccaggcgtggggttgtggcactaacatgcatctctggctaagcacatctcagttggtgatttggaccaaaaggtcgatctccaccgcagccacagctgtactgtagcttttctccagtcattctgattctcctaggccctctctgttaaagcctaagcaaaacgttaaggccttgatggaatgttaaggcctaggtaactgttacctggttagcctgccattttatgctgttactaatattataaggaaactttctaatatgttgtttctgctgttactagggaactttcttgtacccgagttgattacatattatgttaagttctgtgcttttgaaaaccaatcacggtagaagtcagtagaactgttttgtctagttacccaccataagcttggacctggaccaaccacccagctgcacttcctgcatctgtgtataagcttctatggtatttgcttttataaactgccgctgagatggactccaacataagagagacacctgcaccaatataagaaattctttggaataggactaccattttgagtagtggttgagtaaagtttaagttcccaagacctccctaggaactgacatcctacttggcggaaggagacacgtatgtatgtacgtaggtgactgacattcttgttggcatgttaagacttgaatgttagataacacaggtctcatcctggttgatgagttaaagcatgaatattaggcaaagcaaggcctctgccgcagctgaacaccccaactaatgggagcaggatacaagtacaacaaagccatgttcctaaggaaacccccatccctaaatcctgattggtggaataacttggcatagatgtttgtagatctcaggtttaaaaaacctagcaggaccttaatacagtgtcatggttcagttcctgagtctggaccatggccctgattgatcaatcttggagcatatatatgctcaataaactatccctgtgtgactgagatcagtgttcgtgtggttcatatgcaattcctggaccccagccctctctacagagtgagaattcagactcaggattttcctcacagtgcactgcagtgtcccaggaggagtttcatctcacctaagccaagtacgtatagatggctgtgtttcacttctcctgcttgcttcttaatgcacagcacacagaggcacagcattttgtttccatgtttctttgtgtttaaattatgaggctggctagagaagtcttgctatggacttactagtgaatcagacaagtctcgttccctgtggggttaaggtgctacggtaagtgagggaagagaatctgtccagtgactgacagtgcagccaggagccgaggggatgctatgcctgggccgtctgtgttcctctcaaagcaggaagtgctcctgtgatgttgttgccttggagagattgcttaaaggctataaatgctggcagggcaagctgctgcaggacggagcctttgaggttgccaagagaatcttgataaaatcacgtactggctgtccaatcaataagaggggatattaataataatacttactcaattaggttgttcagatagcctaatgagattcttaaagttcacatgctggttctgtaagtgatttctggtaactttcttgaacttacttgattttttttttcttcatgtttgtttttgtggtgtgtgtgtgtgtgtgtgtgtgtgtgtgtgtgtaggtggatgtcagaagacaggttgtgggaattgattctcttctactatgtggatcccaggttgccagatgtggcagcaagtgccatttacccacagatctatcttgtaggctcatgatgaacatatttttaatggctaagaagacttttttttcctttttgtttttaatacaatgtctcagtctatggctagcatgagctatggttcagcctttcaagtgctagatttagaattacgaaccaccacatcagctctttgcttgcttttgatagtagagaggtgcattttagtgcagaacgggctaccttagtcacccagacatgagcgaagaagaaaataaagaatggggctgagcaacacagccgcctttgctaagagtgctgccatgctaggtaattctgaggaccatactgcgctctctagagctttgtctcagctggcagaggttgaggagaagatagaccagttacatcaagaacaagcttttgctgacttttacatgttctcagaacttcttactgactacattcgtctcattgctgcagtgaaaggtgtgtttgaccatcggatgaagtgctggcagaaatgggaagatgctcaaattaccttgctcaaaaaacgtgaaactgaggcaaaaatgatggttgctaacaaaccagataaaattcaacaagctaaaaacgagataagagagtgggaggcgaaagtacaacaaggagagagagattttgagcagatctctaaaacaattcgaaaagaagtgggaagatttgagaaagaacgagtgaaagattttaaagctgatatcatcaagtacttggaatcattagtacaaacacagcaacagctgataaagtactgggaggcattcctacctgaagccaaagccattgcctagccttacccctgtgaaggagacattggattccccagtgagatcatctagaaaccatctaaataaaccactctatattttatgaaaaaaaaaaaaaaaaaaggaatggggctgaggagacacctcagcagttaagagcactggctactcttcagaggactggggcttgattcccagcacccacatgacatctcacaaccatctgtaactccagtttcaggggatccaatgccctcttctggcctcctcgagttccaggcacacaggtagtacgcaggtatacatacaggcaaaacatgggtacacataaaaatgactagaattttaaaaactgaaaggaagactgctttctgtctcaacagggctgtgtagcaagtgcatgaggggaggagggcaagtgagatacctctgttttctaaggtcctccacgaccgtagttagacagaaagctggcagtacagtgtgttaacagtccaggcactggactctggcctagatggatggggcagtgacagaccctatgttaaaaagaaggtggacagcatcccagagaaaggaacacctgagtttgctttctagcctcccatgctggtatacgtgtgtatgagtatacccttcaacacggtcacggacccacatccatattctgcaccctaccatacacacacacacacacacacacacaccccacaccacagagcaagagaaaatgaatccagttctggagagtctatcaggggaagaaaatcctgactttgaggccaaattatagatcgtcgtgaagctaatcaccccccagtgctgcttggctgtacgttgtttacagggccatcgatccggtcacggccctcttctcaacatggcacatgttttcgtctcctctcctttatttcagtttttatcctgtttcaacaagactgaattccccttgactcactgaacacgtatatctcgaaagcgaaggaagagccttttgatatgtgtgctgcacaccttgaagaagggcttatgtcagctggcaagaaaacggtcttccctcctcaaggaaacagacgcgagaaaccagacttcggcagggggttcagattccattcgtttactcattacatatttatcaagttggatattgtctctgtgctcacagccaaatccccattgacaagcctccgtgcaggactttccaggttcccttttgtttcttctgccccaatattaaaagatgaaggtttcaaactaaaaattgtattgctcctgtctgatacttttattgtcaatatgcagagctactttaaaatttttatcttgcatctagtgacgtactcaattcctaccaatgttggataacttgtataagtttcttctccattgctgtgaacctgccattcagggcagcttacagagggaggcgtttatttgggcttcaggctgcagagggataagtccattgctgtcgtggtggggcagggaagcatggcagcaggcaagggcaacagtggcagctgggacagcaggctgagcgctccaatcttaaactacaagccaggagtacacgggaaatgggtcccccaggcatgcgatgcttcctccagcaaggccacactgccaagccaaacaccaccaccaactcaggaccaagtactcagacttaggggacatttatcatcctagcctctatacttgccacttagaaaattcaagtagtcacgttttgaaacgtactgatttcttaaaaaaaaaaaaaaaaaaaaagacactgtttgggtatcctggtgcatgtctttaattccatcacctgggacgctgaggcaggtggatctctgtgagtttgaggctagcctggtctacatatagcaaattccagtccagccagggctgcatggtagctctgctgtattagaggatgacagttaggattccagcacctgtatcaggcagctcaaaacacacacccccgcacacgcacacgcgtgcacgcacacacacacacacacacacacacaccattttattgcattggcctggacatatgaagttcttagatgaggtcattcttgtcatgtccttgacgggggcactgggtgtttcttcattagctttatttgctactgagttggtttctcattgagttgagaagttttctacttgtatttctttctttctttattttattttatttttttttctttttcgagacagggtttctctgtgtagccctggctgtcctggagctcactttgtagaccaggctggcttcaaactcagaaatccgcctgcctctgcctcccgagtgctgggattaaaggcgtgcgccaccacacccggctctacttgtatttcttaattgccaaattatcttaggtgtatgggtgttttgcctgtttgtctgtctgtgcaccaagtgtgttactgatgccagtagagggcagaagagggtgttggctcccctgttattggagttacagactgttgtgagctgccatgtgggtgctgggaattgaactctgatcctcttggaagggcagcaagtgttcttatccactgagccatgtctccagccacccctaatttaagaaatactaggaaatgaatgtactggttatgataaaatgcaccatttagcatctctggatgttattatatttttctgcattaattaattgattatttcccccctttttctgttttgagacagggttttattattaccctggctggcctagctagaattctctatgtagacctgggtggccttaaacttatagaaagccacctgtctttgccttctgagtgctgggattaaaggcatgcatcaccatactcagctgttagttgatttcttgatattgaactatgcttatattcatacttagaatgcattctcttttgctatggatttagtttgctaatggtttaaatttttttatttttaataagtttgtgtatgtggtgtgtgtgtgtatgtgtgtgtgtgtgagagagagagagacagacagacatgacagacagacaaacagacagacagatagactgtgtgtactaagaattgtgcccagggccttgtgcttgctcagtgcatgctctaccaccaaggcacaaccaatattttccctttcctccctccctccctccctcnnnnnnnnnnnnnnnnnnnntccctccctccctccctccctccctctctcctttctttcttctctccaccccctaatgtttcctacgctgtcctggaactcaaattcacaattctcctgcctccgtgtctccactgctggaattagaggcactcactgccatacctaactctctgcagttctggagatctcgggcctcctgcacactaggcaagggctgtcctctgacctagacccccaaccctctgtttcgagtaaggctttattctgacttattttctttaatgtgatgtgttaggtccataagagccgtcttctccatggtattgtggagcatctgggtgtggcgtgtggcatttactgggcactaaggctagagttggcatttgcccaggctgctgggactggaaaaggtgtaagataaggctggagagggagaacgctggagactggcctcttggacttggtctttgcagcttcctgttgtgctccgtggctggctagggcctcctcagctgaggaagtgtaaactgagttgccctgcactggagagtttaacagctattctagaaatcccttcctctttgttttctccaagaaaccagccactccgcatccaccacccttccctttccggcctctgctctcagccactgtggccctccctgtatttgctattttccccaggtgctttaaataaaaagaaaatcctatctcatctcatagccagcatttcccatgtggtcaatataggttctttctttggacaaggtcttaccatgtagctcttgctggctttgaatttgctaggtagaccagattggccttgaattcacagagatctgcctgcctgcctctgcctccccaatgctgggattaaaggtgttctctgtcatgcccagccccattttggttttggtattgctatttatgtttgaatgtgtgtgagtgcgtgcacactcgagtgtgattggatatgagcttgctatggcatttgtgtggagatcagaggacattttgctttgaggcaggggctcttgtttctggtgttgccctgtgcacttgtattctaggctagttagctcaagtacttctggcaggttgtcctagatgcctgccacagcatccagccctgtgcatggatttaggcatcagacaccccagatacagaagcagagggtctctttcatctggctttagcacagcgtctggacgccagggcttcgctgcctcagttgatttgagggctgtctgccatagtaagaagaaattcattagcagaaacattactgtctgctgctgacaggagaagcacttaggtcgttgaagacagatggatgctgtaaaatgcattctaaatctttgtcattggcgtggctgaggaccgcagagaggacgcactggatctgtcattcattttccttttagctcagatagcccgacagagccttagacccatgtatcaccatccctcctcctgttttcagagtctttccatggtcttggctctgacagaacttgggggcatcagggggagtgggggagggaccactttacttcagtgtgtttctgcatttgttttctgtgaggctttggggtcagaggtagtctttaaagctacccagttgataggggaaatgataatgttttcattttgatactgtgagttgtgtgtggtggcttttgggagtctgaatgattgctgaaaacttcaaggccagcctgaactacatggtatattactactggccatcttgagctgtacacctgtatttgtttcagttctctagagaaatatactattggaatatatatatatatatatatatacacacatatatatatacatatatatgtgtgtgtgtgtgtgtgtgtgtgtaatattaaaaagagatttattagagtgccttacaggctgtagcccagctaatccagtaatggcctcatcttagttagggtttctattgctgtgaagagacaccatgaccatggcaagtcttgtaaaggaaaatatataattggggttggcttacagtttcagaggtttagtccattatcgccatgatgggaagtatggcattatctaggcaaacatggtgctagagaaggagctgagagttctacatctgattagcaggcagcaggaaagagagcaacactgagtctggcttggacatttgagatcacaaagctcagggctggagagatggctcagtgggtaagggcaatgactgctcttctgaaggtcctaagttcaaatcccagcaaccacgtggtggctcacaaccacttgtaatgagatctgacgccctcttctggtgctgtctggagacagctacagtgtacttatgtataataataaaaaataaatctttgctctagagcaagaggggctgaccggagtgagcagaggtcctaaatagatttccaacaaccacatgaaggctcacaaccatttgtatagctacagtgtactcatatacataaaaacagatgaatattaaaaaaaaaagaaatcacaaagctctcgaccccagtgacacacttccttcaacaaggccacacctactccaataagccacacctcctaatagtgccactcctatgagctgatagtgtcattttcattcaaaccaccaagggttgtctcccaaaagaaaggccacaagactggttgtctcaggtggtcttcggtctatatcagaatcccagagaagtaggttctaatatcagcgagggaatgcctcagtctcaggatagataacttgtcagtgagtgtgaggtcatgcatagcttgttcttccatgtccttttatggggactgcctctagaaagtgtggtccaggtttagggtgcgctatccagctgcagatgatccagtttaggatgggtcttcccatcctagatgattcagatgatcccgaataatctccagcagcttgggtttcagttcattccggatgtagtcacgttgacaaccgagatcagccatcacaactccatacacattaaataaaattaaagcaaaacaaaataaaactaatatttatgccatttactagtgaggataaacaattgttttttgactttatatagctgttcatttcttgtgttggactatctctctgtgtgtgtgtttttctttttcttctcttttgtacttttctacttcttttcttcctttctttttttggggggtgggtggggcagggtttctctgtgtagctctggctgtcctggaacttgctttgtagaccaggctggcctcaagctcatgcctgcctctgcttcctgtgtgctggtatgtatatgtgtgtttctatgcatgcctatcacatgaacatattttccaaccagcatgccatagtcaggactcacttgctaccatttgttgctaccctacaccagttccccattcctaacctctcaccattaagagaatatttatgtacttatttagacaagacttatctatgtatctcaggtggcattgaacccgtgatcctcctgcatcagccttccaagtgctgaaaattttcacatcctaaatacatgaaaattaatctgaagtctttcttacgtgttgtaatatgtaagaactagtgagacgaaagcttcagtgttcttgtgtaacagcgcagttatggcctgcttgagctgtgaggacagacagcatatggtacagacatgagcatctttattctatgattctgaaaaatttgtatccccctgccataagttgtgatcagacttcttaagcaaatggacatttgttttttgcatttggaatttgagaacattatttgagaaggtcctgattattttatccttttaaaaatatctaaccaaattctctatcggtattaattgaataatatattattgtttcagtacttgaagttccagagttatcaattaatattaaaactcagatttgttctgttgatttttgggctgacaggtcatcaagtcatcaagctgacatacaaggttctctggggatgagcatccctaaccctgtgcgtcaccctgagcatcagatggaccacccacagtggtgcccagccacagggcttacttctaagtgctgacactggtacggttcttggtccacagaggattgatgatggctaaatggagccacttgttaatggcttatggactgtctggagctggccagctctaaaagtctcttgagcagcagttggacttgatttattccttggacactggtggagcaggaattttgttgttctaagaaacacatatggaggctgattgtgtttggggacttccctacatgccactcctggaaaaaagtgaaggtggagtcagaatattttatgtagttggtactgtttagtgttatctctggaatgtgagaggtaggtggtgagtgctctggggtcctgggtccagttctatgtccctctgcccgtcactggtgtgtgacttaggcccatcttctaagctccttagtccatattctattctatcagtagtcacatagagataatgaactctcttcactgcttccaagttattctaaaggataatgaggccggatgcattacagggccttggcctttgctgaacagttattttggcagcccttccctaaggatggagtgtgtggagattacatagggttgttgatttgggctgtatgtggttttgcctgaaggacagcattgcttactgtgtaacttactgtgttagaaatataggttccctctggtttggtctgttgttccccctacctggaaagcattcaagagaacattcaagtctttgtcctcaccctgtctccattgttatgctccatagcatatgctaacttctaatgagaataaatgacggagtggtggagggattctaaccactgatcttagcattgagaatccctcatttgtcttctcctggcatcttcagggaggtgtggtgcctgcctactgcccactgttgctggtactgaccctcctttgttctgcgtttttttttttttctgaaaagcttaggcacggccaccactttcctgcttcaaagcttagcatcctttgctgagcactgctctaaagcttccttacgatgtttgaggctgcagctcatctcctttctaggctgtgtttcctgtcattccccccacagcttcacacctacccaaggtctggtttccatccagaagtttccaactttcttcacaggtctacctctttttcactgaagggcacttccctgattctggagtgtgtgtgcccacattctcagtatccccgtgtgacctgcctgctgagcagggtggactcaccatcttccagccagagtggctgagtctgaggggctcacctggggcctgacagccagctggaatctcagtcccggccttctgccatcctgttgaagaatcaagtcaaagttatcctgacttgtcctccaagagaacgactgctgtccctccctgctcttggctataggttttcctttatttgtgcatttattgtagcatatcaaattgccatgttccatgctgcagcctgcaggagagtccttcagtaactcccctcagcctgcttgcttccccagaactgcacctggcagtcatcaagaatgctgtttggattaaatacatgcactaataaattctgctttttcatatcctctcagctgtggtttaggggctacagcacctgtcagttacagcacttaagatcccatgtgttggaaaacacctgtattttggtctatagcataaacagggagtgataattattttgtttctctgacatctcagagacataatcaggtattttatcactagaggaaaggtgcttaacacatgtttaattatattttaggaaagtaaccttttagctaaattttgtccaacagcagctgtacctgggagaggctttgaggaaagcgagctcctgcaatctgttagcctttctctacaacagcattaaccaataataatcctagtcttcaattgggacggctggtattttcctccatcatgtgaaatgtgaaatagaagcatcttcagcaggtgtggtggtacacacctgtgatctcagcacccagggggctgggcctgggctgcctcgagagaccctggcaaaaccaaaagaacaaaaagaggcagtggtaggcttagaaatcctgttactgatctcctgtgtattggcctcaggacaagtctgcaggtctcttcctaggtgccattttgttattttgtttccaacttggttacaacacatggtttctagacacagtgtaaggttttggcctcattctttccttgggcttcttctttacctaactgcctctctgtcatctgttgtcaagtgaggattcagataactggcccttctttgcagagcccttctcggcagcttagctcagatggccttacaaagaggatgggactgaccagtgaagccctgtgtctctttacaacaggaatatgttctgaggaacatgtttctagaagatttcctcattgtgtgaacacggtgtggacttccaaacctaagtggtggtggagcttgctgtaccctttgactgtgtggaatacagcagagtataggctgcccagtgagtggtacgacatgttacggtgttgaattctgtaggcagttgtaacacagagaaatttgtgcagttgaataatttatacactagcaaaaggacagtgaaaacatgatgctaatgagacaaaatagcaacaggctatatacagcacaatttttgtggaactgcggggcttctgttccctagagtaatgcagccctgtgcacgagctctgcacttaggctgcaacacatggatgcagttttaaatttgatgacagctcatcttactgtaataaacttaaaaaaaactttttgatgtcaaaaaattccaaaccccatagcttagaacacaaacctcccttttttctttttcttgctgtttcttgctttgacaagtcccagggattaagcccagagcctcatgcattcagagatcctgtttcttctcttattccttaatgttcaaaaagtaattcttattagtttactttgtgtgtgtggtggtcagaggataactggtaggagtccaggggattgaactcgggttgtcaggcttggcagcaagcacctccacctgctgagccatcttgcaagcccattcttaattttttcctgtgaccagactcttggtgcagttttcatttcttcttcagtgactcagttaaccgtggacataaagaggaaccacccttctctggactgagccacattggctgggatctggagcagccatggaccaagcaaatggctctgcagagacatccacgtggacttgggggttgaaaattcgtattacaaaggaatataggacgcttctagcacaggtgtccagggcaccacgcctcgaggaattcctaagatgtggattgaaatctgggtactattgctgagccaacgcctcagagctgacactgttggagacaaaggaatgatatgaacactgactgaccataggaagcatggccctctgggatagggttacaggcttccttccagttcagccttgtgttaattttcagttttggttgtgggtttgaaggcctcccactgccacagctggagggtgagtttgtcacaaaccctgagcacgagagagctctgccagaaggtggtttgagtagtgtccagaggaaggagggcgtgcttccgttcccttcttagatcagaaaggcagtttcaactcggtggccctttcttttcccacagacggttttaagaccgaccacagaaattatatctctcccaaggagggacatacgtgtcaaatggcacaatttggcacataaattttgtccctgagaggctcacaaattccagagtctgtgtctgataaaaaggacactttcagtcttcctgaaaatgtggggggatttaaagcacatttagagatgagagcggggaaggctgttgtcatcgtaacatctgatacttgccattggtctgtgagtctgtcctgtcctgttccttgcctgagtggcttttgccctcaagagagtttggtctggggtaatgatttacccatatttgatcacatagaacagactagtattttgtttcttctacactctggttctgacaaccaagaaagttctttactaacgtttttgacacatctgaattgtcttattttgtgagatgaatgagtggtggttacaaggatggtttgggaactggagagacggctcagtggttaagagcacttgctgctcttgcagatgactaggctgtattgccagcacccgcatggctgctccctgtagctctatttctaggggatttaatgccttcttctggcccccaaccccggtaggttaccaatgacagaccaaagtaatgattctgtctaactagcttagtggacgagtgggtttatttgggcttactaaataggatgcaggtgaccccacacagctattgtgatggtttgaatatgtttggccatgggaagtggcactattaggaggtatggccttgttggaggaagtgagttactgtgggggtgggctttgaggtcctatgctcaagttctgcccagtgcagaagagagccccatcatggctgcctgctgaagaatctcctgtctgcccttggatcaagatctagaactcttgagttccttctccagaacaaagtctgcctgcaggatgccatgcttcctgccatgatggcaatggactgaacctctgaaactgtaagccagctccaattaaatgtttgcctttataagagttgcattggtcatggtgtctcttcacagaaataaaccctaagacaggtatgtatcactaaagtctcatccctgcctgggtgagacttcccttcactccttctccttagctgtatagatggagcatgcctttatttatcttctctgttctatctgacaggtatgtcccacatgtatcccacgggctgcatatgccccaggagagctgtgagtggggcccagtacaaatcggaacttactttatgtatgacgtcttgtaacttgattgatgcttcttgagcatgaactgtgtgtgtgacaactttgtgttgcaatatcagaagatgggacacttgcctgatctgctcctaggtcataacacaggtagagacagaaattaaatatggccaggaggaaggggtgctggagggagtggccctaatctcaggtgagggtctgatgatcctctgctccctgggatgcatcagtagactcatcgtctgctaagatgctgatggctgttgtgcttgaaggacaaggtggtgtgggacagccatgcgtgagacctagactctttagatgttgttgaatggcctgtcacttcagagtcttttccttttaatgtagaacaaccagatttgatgacgattggcaggttctgtgccccgtggccttgtgtgatgtgtgtgcagaaatgccagtggaagaatgaacattttgctcaattgtggttttttggctggcaggatcctgagagcaggctagagatgggcataaaagagagctggtcttagggagagttgtgtttttagttgtgttaggacagcttagtctgtcttcttagaaagctgtgtacttgactttgaagtctgccaagtagtatgtgcatgcattgaccaaacacaatacccatgaaaagtgagctaagaaagaagggttactttaggctcactgtgatgggaaggcaggggcaggggcaggggtggctggtcacattgcatctgtgctcaggagacagagagatgaacactgctgcccagctcccattctccttttgattcagggcagggcccctgtccatatgatgtgctgccctcatagagagcgggctttccacttcatttagcctagaaactcctgtacagacaacacccaaattcccccctccatggtgattctaaatcctgtcagagtgacagtgaggctcatcccttacacctgcaatcgccatcttcttgctgtgggccttcgttcttcgtttagggaggagcttttaggaatgcctctcctcctttagtgcaggtgactctttggcctggaatggccacactgctctcccctggccttgcttttctgtttggcaagtgtcctcattcttcttaagctgtcctagcaccctttgctctcgtttttcaaggcaaggagtactgtcacaaccagttttgctttgtgtcatcattagcggttttggcattcctactgagtggtttaaacacagatggtcttggccctgtgttttggtagcccggtatcgtcactttggctgacatcacttaaatgctcagtctgttgttgtaatagcggtgcctctttagaaggcatccataggaactatgtgtaaatccatcaactaggcaaatccttgtttctaaggatgtctggagcagggactacagtctggagatcatggaaacctggccaaagactatggactggggttttgattctgaaattcctttgaaggtgttctttttgtactgtgctgatggatgcattttaaagggtagggttactcataggaaagccagggaaacatattctgtttctaaaaggctttatcagcctatcagtgtggaaacaggtggtctgtgcgcgcacatacaaggaagagtctttgtcacataggaaatggatcaaaatccagagaaggaaagtataaacctgttcccagacagtaccaccttgcacaccgggctgaggggcctcaggacttggtggatgggtgcaaatggccgtggaggttttggagattatttgcgatggggtttctagggcagtggtggggaaaacagaaccttttacactagtaagagtaagtgacgttcaagagcttatacaagctagttaagacatacgtgaataactccagggttgaaaaggataatgtcttaaaaattatccagtgttgtatgaccatttcctctctgcagtttagaaaattacagagacattttataattatatgcacttgccagctttactgaaataataaacaactcccaaagcccaaagcttgcaacagacattaatttcaggtcatgttgtgttttctggctgtgagtcagctgtactcgctcttcccaaatcttacatttctgaaggaacagtcccttttggggacaaggtaggcagagaaaaaaacaagagactgtgggagacacaagaattcctaacagtcagcttagatttggcctatgctacaatcattcatttcccattgactagatcaagtcacatgacttaacccaaagccagtggtctagagtgttttcctgtaagaagctacttggaaacaataagaacatgtgatcctctcatgggaagaggggccagtcacttggggtgtcctcaggaagaacagccagtgcccttaaccacttaatcagctttttaaaaaattaaaaagaattatttatttactttttgtgtatgaatatcttgtttgcatgcatgcctatttggtaccctagaactggagttacagatggtttgggtctaccacgtgggtgctggcaattgaaccagggtcctctgcaagagcggcagtgggccttaaccactgagccatctctctggtcctttgacatattgtttttatttttttaaagatttatttattttttatttatatgaacacactgcagctgtcttcagacacacactagaagagggcatcagatcccattactgatggttgtgagccaccatgtgattactggaaattgaactcaggacctctggaagagcagtcagtgctcttaaccactaagccatctctccagccacgacatattcatttttaaaagtttatttagcaaggcggtggtggcacatgcctctaattctagtgcttaggaggcagaggcaagtggatctctgagtttgaggccagccttacctacagagcaagctcctggacagccaagtctacacaaagaaactctgttttgaaaaaacaaacaaacaaacaaacaactaacacataagccataagttttaaaatacggttttaactgttactttattgttggtatatacaataatttccttttttgtcattttggtagcagattagtggttaaccctcataaagtgacttgggaggttttccatggttctatgtgtgccttggaatacttgactaaggcaggctttgggctccctggggctcagctgcaaacctactggcctaggtggtcgttgttttcggccatgggtctgtcctttctgtcactgcccaactgtggctttctggacttagagtatagtaacttgtaatatacatataacttgtaatcatatagagaaataagatctaaatagttatatttttctttctatattggacaggccttgtaagttttactatgtctagtccatcttctaaaataatcagagtttgtccctttttcttgttttcagtatacattttaagctttctcacttttaacaaaacgagagcatggagtagatgtgactggatgtgttcatgctgtgggctaaagccatctcctgcatgtctctcgctgctgtgtgaactctctcctgggtgtgttttcttgggttaagttgatgaggtaatgcaggcttaaggtttcttttttctttttagtttgtttactcatggctgatgtggttataacacatgtctgctattggccttgcgttagaacaggtgaattggactggctgtttctgcttgatgttgctagaactatcgtcttgagttttttacttgtaatcactcgaacaggacaagggtgaggggaaggaaggctgggtcctggcgttcctgtagaggaaagttggcttggctcatcctagggtctgggttccagtggcctgatctccatggcagagcccacccctctgtgttttcagctgtgtctgttttgtgtctgtgaacatgtctagagttgtctgcctgggttcatctgccctcaataatgcaccaaaaaccttgtgggcagggtgccccctgctggtggtcctctgttatgctttgttcttgtgcacctcagccagaaaactttctttgtctcattgtcttacctaccccaaccccacaactgcattttcaaattagggtgcacatgacagggttgtttgtgagcctcagtgacagtaaatagcctcaaaaactgttaaaggtgccttgtggttcccacttcagctgtgtcccacttgtgtctggtagaacattttagagagtctggcacttgggtgaccctctcctgatttccagagtcatactgcttttcctatcaccttttacccagttctttttgttgcctattctttagattctaagttagtgtctgagggtaggatggagaggagtaagctgctgtgggtaacttactgagatggtctagaagtctatatttataattgttgtctgtctgtttgtctgtctgtctatttttttccttccttccttccttccttccacctacctatttattctttaagcctagctttgctctataatgcaaactggccttaaacttgtagccccctgcctctgccccctcagtgctgggtttacaggcaccgtcctctctgcccagcttttataacaagtgtgcaacattttgtcttgctgctgtaaacaccatgggtcctggttattttccaggtttcatggtgtttgccgttctgttctgagtatctttgacaagcagcttttgaggtttttccttttaagttgactctccctagtgagtttaagttgaggttcacagcagaatcatctgtttgatctgtgtaggacattctttctttaggtgtccactgtgcatgtgaattagggcacacaaggcaggtacaggctgtgtacagagtgctgtccttctctgctgtgggctgctgtgagctgctttgccaggcttttctgaagtggagtcatcacattccccagattttcccagtggtgtcattagagaagctgggttattttagcatgccttgtgtttcactgcatccgtattggttcccggtagatgtcattctgcctttgtaaacctgttaacgtaatgaagaatcccaccagagatttctgttaattatcttgctaacagatggccataacagatcttgaaactgaaaatctttgaaccagaggagtttgtaaagcaatgaagttctctctgtgtcttccttggatatggggtgatgggcaggggacggaggaaggaatgttcttacaggcgagagttgacattttacagcagtgagtatttttttttttcatcagcaagcagttaccatagttcacaagaattattctagataggtgtttgcatgataaaaccagcaagaaaatgaatttgaggtaccagctatgtctctactgtgatttttttttcttttcagtaacattggtgtgcccatggtaaaccctacaccacagcttataatgaaatgtaaaggtacttaacagacaaatcattattattatttttttaaactgaacagtgacatgcatcttgccatgctctcacagttcacacacactcctctggtactgccctgtaaatgtgattttgctggtatttcctcagatgaagtgatgagaggagagccatacttgagctttatgaatacatggcttgggttgagcccagaacgtttttatctaactatccctaggcctagaagcttctagcctctatacaatctaaacttctgcaagcctggaccttgaaggcttccccttccagcctctgtctgctatcgtaggcctagaatgtttcagcctctgagacttacactgaataaactcaccctttctagctctttctgaactctggatggctggtcaactcagctattctgactcaaactcctctccaagctgactgattcaaaggcttctcttgacttctgactgaattgctctgcttgaaaagacttgcctctgaactccatgtgctgaattcaactgcactcaactgaacttctgtactttcctctctccctcactacttttaagtagcatctctttcttgtctgttcttgtgtgagttgggtgtatcctatctctgataaattctgtcaaatctttctctgattcatcactttgtctgctcctcaagtagttgtcattgtttgggattaaaggtgtgtactaagagtgtgtctgtattgcattcagagggatcaagggtatgtgttccagccagagggattaaaggtgtgcagctgtctgcattccagccaattcatagctttggatgtgatctcttgccagagctgccatgttgttggattaaaattcttctgcgctcccatatactgaccccctcagtgctgctgtacccttattgcaaataggagagcttaaggtacagtgtccctgctagtggaggcaagcttttaacatggccagtgtggctcaggttacccttggaggtattctcagttcccaggtgtctatctggtaccttctgttgttctaagactcattcatctctacttttcgagtcccccccccacccccccccagtacagcatagtctctgctttcatggaattcacagatgagtagagagtcagacagtcaaatcagtgaatatgcaataaagttcaaataatgataatcctgtgggaaacaaagctggagaaggagttgaagagtgatgaaaggatacagggttacttttatattttactggactgagatgacctcttaagtgggtagcttccagcagcagcctggatgaagagggtgggtagccacatcaggatctgggactgggacacacactcggacacacacacactcggacacacacacacacacacacacacacacacacacacagagcgagcgagcgagagagagagagagagagagagagaacatatagtacaaagttctgaggtacagtgagcagtgtcagccagaaggccagtgattgagagtaggaggaactcagggagagaagtagtgtgtggaggaggggagggggcgggtcagtaatgcctgctctatggaagtgagtttagacttgtgtaatgggatggttttgagaatttaaagcatggaagcgacatatttggatttatatatttttaaaacctttttttaaaaagccacgatctcattatgtagtagtcttggctgtcctggagcttgctgtatttacttatttatttttgattctatacctatgtattgtgtcagtgtatgagcttgtgcacatgagtgcaggtgtctgaagatgcccttttttttttaaagatttattatttttatgtaagtacactgtaactaacttcagacacaccaaagagggtgtcagatctcattatggatggttgtgagccaccatgtggttgctgggaattgaacgtaggacctttggaagagcagtcagtgctcttaaccactgagccatctctccagcccctaaagatgccctttagtgctggagtcacagacagtcatgagctaccctatgtgggtaccctttgctaacagctgagtcagctttctagccttggatttagtttagttttgttttgaagctccctagctgtggtgtggagaactgtgtctgcattcatgttggttgtaggtggtgctgccagcatgagatgatgcctactccactgctgagccctctgctgagctgagatgcctggacccaacccttgctcatcacctctaagctcttcgtgtttttctgttgcttttgtttctcatggggcagtgtcttgagaatcattttgtgataaacttatgaccctgaagaaaatgttggctttacctgaccggctttatgtttacctagaaggatctatgaaggagaacggagaggaggaataggctgggaaaattccatggaaaggaacatgggctcaaccgccggtacgccaaacgctagggcaggctaggtcctctcttcagtgtgtgtcctcatggagagagatcacggctgacttgctaaccttgcaaggctgtcatgggtgtggtcagagtgatagcctctctattccagagactttgggcactggaggttcctcagtcgttcccatgtgcccacctgctgtggggaacaccctggaacgaggaactacaccctggctagggagtcccaggagggaaggatctgacctgatttgattgcttgactctccctataatcagggcatttcagattatatgtggctattcctaaaggttactggctaaggtccctagggcaaagcctaggaaagttagcatagggtctttgtagaccagggaaagagatggcaggtagataattacagtagcacagcacacacacatgtactcaggcacacacaaggagaagccattgttggatagcttatatactttggataagtcgggtgtataaaagatttaaacagatttttatgtgtgaatgctttgcttgcttgcagatatgtatatgcaccacatgtatgtgtggtgcttgcagatgccatacagaacttttttagatactttagaactagagttatagacagttatgagccaccaggtgggtgctgggaattaaaccttattagtcctctgcaagagcagcaagtgttcttagccactgagccatctcttcagcccctaggtcaatgattaatattgatagttgctccagtgcaggtgcctaccaaatatacacaggagtgggtcagggaagactcaagaagagagagcatctcatatacttggagacatctatctaagatgaggtagatttcagagacagtatgtgacaacatggtggcttctggaagtggcccggctaggtcagtttgagctgattgtttggccaaggatttttatttctttcatacttttgtgcagtggttaggcctagcggatggcctctcacgctgccctgtggttggaagcatagctgagacaggagctgtcgtagggttctattgctgtgaagagaccatgaccaaggcaactcttataaaagaaaacatttaattcggggctggctgacagtttctgaggcttagttcattaccatcatgatggcaaacatggcagtgtccaggcagatgtggtgctagaggagctgagagttctatgttgatccaaaggcagcaaagaggagactggatgtgtttcacactgggagttacttgagcatttaaaacctcaacgccctgcctctacagtgacacacttcctctaacaaggccacacctcccactggtgccactccttatgactaagcattcaaacacatgaatcttgtggggggtcatacctattcaaaccacctcagaagcacagtgtagggttgggagtttgtacccatgagtgtcatctgtaaagatgacaccactttaatagttatagaaacttatttttaaaagacaggtctctctctctattatatagccttggcttcctagaactctttctatagtccagcctagccttgaactctcagagaatctacctgcttcagcctttcaagtgctaaagttaaaggcattcaccaccatgcccagaaaaccttttatttttgacattgccttaagtgtctgattacatgatctgtggttggtgcagatgggagcaaagaaaagaacgttctgtgtgctctgtcacccacctaggaggatgacatttctcttcaccccaggccatgctttcctgtcttgtctttttctttggggtctcctctgatcaactgtagctcatggatatgactgccaaggtgacttttaggggacaggtcacagcagcctccagagcacttcctttaccccactctatgatctgggtcaccaatgcctttccattgctatcatgtcactgtcttgccacattcttagtctttgtcttgcagtgctatcagaggtaacattcagggctctttccaacttcttctagacagggctctgttcccttgttaagtcctaacaacaggaccattggactgggcctttgtcttagttagggtttctcttgctgggaagaggtgacatgaccatagcaactcttaattaaatgtcttaaggaaatcatttaattggtgccggcttacagttcagaggtttagtccaacatagacattgcaggaagcatggtggcatgcaggcagatgtgatgctggagaggtagctgagagttttgtatccaatcagcaggcagtaggaagagacactggctcaagcatttgaaatcccaaagcccacccccagtgacagttcctgaatcaaggccacacctctttatagttccactccctccctgtgagcctatgggagccattttcattcaaaccaccatagccttttaaaaatgttatatttgtaacaaattcttaacatgcagtttattcaggtagctttacaccttcatcctaaggggaaagaatgaaagctgttgttttgtaagtctgttggccttcctttcttccttttttcctgcctgcctgtcccacccaccttcttccctccttctattctaccctccttctatcactctctgatatttttctgtctgaaaatctctttgatcattttaaatctgaatttgtgaattaaatacaaaagaggacagattgtatgatgggctaaggtgctggttatcaaggttttggagacatctgggaaggtgaacttcagttgagaagataccttcatcagattgtctgtggcaggtctgtggggcactgtattgattaatgattaatgtgggaaggccacactcactgtaagaggtgccatccttgggcaggtgatcctggggtgttctcaaaaagcaggccgagcacgccatggagaagaagtcagtaagcagcgtccctccatggcctccgttccagctcctggttgaggtcttcctttgacctgttcatttgagacacgtggagtgaacagaagcactggggctgtcaaagttgttgttgaggtgtttctgcggtggctgcggcagctgtggttggtgaggttctccatccctgtggtctaaggatgctcttctcttcctccaggatctcatcttgcccaacggtggtactccagcaggcactgccagcccagcttcttcatcttcccttctgaacagacttcagcttgatgatgacattgatggtgaagccagagatctctttgtcacagttgatgatcctaagaagcacgtctgcacaatggagacctacatcacatacaggatcaccaccaaagtaggtcttgtttcagaatgtcggggttcagacatgtgcttttgtgtttggtcagttgacacaggccaggctcatctggaggagggatctccaattaaggagatgcctctataagactgcctgttggtaagtatgtggagcattttcttaattaatgattggcatagtctcagcccagtataggtggtgccacccctgggcaggtggtcctgtgatgtataaggtaacaaacatgagcctccagaagcaagccagtaagcagccttcctccaaggtttctgcatcaattcctgcctctaagctcctattgggatgtgtatgccaaatagaccctctccttccaaagtttggtcctggtgttttatcacagccgtaggaatcagcctagaacagtgtgaactgagatcctcttagaacctagagcagtgctcttcatgaactggggtcctcccagaaccgcagtgccctttgtggactgagaccctccctctgcctgtgcttcgtctcctctggttactcttactatagttatgggatagaatgattatattaaaagctaaaaggattatatacttttttattcttaaaatgaggagaagttatggctgaagtagtttaaattaaacatttaatccccatgatacctctgtgtcatatgccagttttgcttaatgtgtccatttcacaatatgcatggccttatatccacttaaatctgtagtgagaccctggttgtaatttggcctaaatgtagttaaagacagaaggggcctgaacctaagccttgtgacggcctgccatgccttctaccagacagacaggggacagttttcacagcaatcctaaaaggcttttgttagttagaattttataggtgaggaaactgaataacttgtatggggctacaaaattgttaagtatgtttctaacatgaaaatttaagactacagtgttcccattctttatataatttccttgtaaaagaatactttaattcttactctttggctgaagggtggggatagatcctagcgccttatgcctgctgggcagataagcactccaccactgagccccatccctaggctgtgttgtttttcatgcagggtttcttgactggcagtatccatcttttgggatgagcaacactttctgtaggatgtgtagtgacacccctaggctctgtcactaggtacttgtagctgtttccaactatctccaactccctttgtgacaatcaaatatattcagacactgccagatatctgctggggatcaaggttgctccttaataggaaattgctgatctaaatcatctctattactaaggagaaaattcttaccatcactttgtattttataatttaaaagtactttacaaaaagcaaaaagacagggaagagggatggggacctggcagagtggggtggggcggggagaacttggtagggttaggagggattaagagggaggtagcgaatgtgaccaggatatgtgtgtgtgtgtgtgtgtgtgtgtgtgtgtgtgtgtgtgtgtgtgtacacatatgtatgtatgtatgtatgtatgtagtaagtgctttagtcaggaaagcattctttttctgtttttcctttaccacaaatcacatactgtggaaagaattacagatgtttcatgaagttttatgggtggtgttagtagctcagataaactgcatctctcttcttcttcttcttcagtcctcagcctctcacaccccagttatattgggaattgaacttggggcttcactcatgccaggcaagtgcagttccactgagccatgttcctggcctcctttttacttcaattaagaaaatggtttattaatgattttttttggggggggtggctggagcaaggtcttgctgtgtgtagcccaggttgaccttgaactcgtgatcctctagggtgacagggtgtgcctctatacccaacaaacttttttttaattgtaaaattttggtaggttctatacctgtttaaattattaggaaagataaacaaaatgaaatatgttcacatatttcttcatcttttattggatggaaatactgtgttttaaaatcacacaaatagtttaactggttgtaaaacacaaacaaatacagaggcgcaagcctggcctccctgttctcctcggctgacaatcttctcaccagaagcagccgttgctgcagtggtgtgcctccacttctttcatttacggcacacacgtagagtacacacagtgtgggttccagtgcgtgtgcgctcttgcttttcctcccactggacagtgctgctgaggcccttctgctcgcatcgttatgcttagctcactctctgggcctctgcctgattatgcaacgattatacaaatgtcttttttaaaaaaaatttttggtggacatttaaaccattctcagctttttaaagtcaccccaccccgtcttttcgcacctggctcccgcgcacaggtctgagtgagggcctggggtgatttgcatagctccaggaattcttagcatttgttacctctccctcggggtgaggttacttttcaccctgcagtcagtaaaacacaaaacctgcttttcttgattgggtacataagcaagcggcctggtggcagggtgactgccttgctggcaagcagcccttatgcaccctgacagttttctacactgcttgattcctgtaccctgcagtcctattcctggccacacacagtaaagagatcctgcagggcttacccgactcactggctaatgcacctgctatcgctcccccatctctcctctccttactccatcctagcctacccctcccctctgcattcttatctctgtcctttctcctggggttatttgattccttgtaactgagaaactgccatttccaaattatatcctggttttccactggggtgagcagtcactgctgagaccttacgttttattatcatgataggtagtgacatctgggaatgagaaagaggaggatgaggtcacaagatcctgcactgggacttgcattctgctgaggacctcagacagctggtgcagggcaggcggtgctacaggttcaaggctctgattccagatcctctaaatgatgagtgtggtggtgattgataaatgatctctccaccagtaaaatgggccaattcaagccagattaaaaatatataaatgcaggtttattgggaaggtgtcctgggtgggtgagtttgatggccccaaggaaggagaccagggaagtcgccatggggaaagagagaggagagagtgaagagaacgtgtgcttgctcacaaagaaggaagaaggggctgggaagaggatagagaagaagaggaagaggaggaggaggaagaaaaggaggaaaagggagaaaaggaggaggaggaaaaaccaaaatgtctgagttatacagcaaagagcctctggaagaagggcagcccagcccttgggctagagagttcagggttgggggcagggtatgccaggtagggactgaaggatgctgggagaacctggaggctaggtctgctttggtatgtaaaatatgcacctcatctgcttgttctggggcctgaaaccaactgatggtggtggtggtagtggtggtggggttggtggtggtggtgagagacagggtctcactatgtagccctgcctggtctggaactcacagagatctgcccacctctggctcttaaatactgcgactaaaggtgtgtgttattatgcccctaattcagactgtttctttttttaatgtttaacattttactttatatgtatgagtgttttgcctgcatgcatgtctaggtaccatctgcatgtctggtgccctttggaggccaaagccagcgttggatgccccggtactggcgctgcagatgatcatgagctgctgcgtgggtgctgaggcgcaaacctggtctttggagtcatccaccagtcttgtccactgagctacctctctggcccctctaattcagattcctgacgactggtacagagccatattgcctgagctgaaattagctgaaggcattttgttatggagtgctccatcaaatctctacggttcttgtcttcctctgtgacctggaggtcagcacagccccttctcagggctggaagctcctggctgttttctcttcagcctcttagaaagtcacaacacagtaacagctaattaattattggacacttaaccacgtgtctatccattttgtggtggaaatttcaatttttattttatgtacttaatctgttgtagaaaacagaaaaggaaagtaagctaaaataatacaatgcaaacatgcccataaactcagtcagaagtaactgtgggatgcctctgttctttcatgaaaatgagcatttgtgtgcagccagctcattactgcactgcagatgctgttctgtgctagcaagttccaggcagcacgcttgctgtcatctgagactagagtcctgttctctccacgggatcgttggttttgtgtgtgtgtgtgtgtgtgtgtgtgtgtgtgtgtgtgtgtgtgtgcagctgctatcatgactgtcgcaactattcttattgttaaaacggaacttcaatacagtgacatggatgtgattgctcagtgacatgtggctaccatgcagtgtggctggagtttgagtgcagagaccattctcttaatagctgtgctgtgctgacatgatggttggtgtgcactgtcagttggagtggagctggagtcacctggaggcacagctggggttgtgtctgctactcagtcatttccatctcctttgctttggccagtttctcattggaagactcagttggctagagcgatgtggtttgaggagtttccctggtactgtttgcaaatgaatgtgaatgggaggaagggggaaaagatgtgagcagctagcttggcagtgaagcaagaacagagcatcaagaaacagcagtactggttgcttcatattgttcttcctcctatggggctgcaaaccccttcagctccttggttccattttctagctcctcattggggaccctgtgcttagtccaatggatggctgtgagaattcacttctgtatttgtcaggcactggcagaacctctcaggagacagctatatcaggctcctgtcagcaagcacttgttggcatccacaatagtgtctggatttgggaactgtatatgggatggatccccaggtgggacagtcactggatggcctttccttcagtttctgctccaaactttgtctttgtatctgctctcatgggtattttgatcacctttctaagaaggactgaagtatccatactgtggtcttccttcttgagcttcatgtggtctgtgaattgtatcttgggtattctgaacttctgggctaatattcacttatcaatgagtgtgtgttcttttgtgattgggttgcatcactcaggatgatattttctagttccatccatttgcctaagaacttcatggattcattgtttttaatagctgagtagtaatccattgtgtaaatgtacctcattttctgtatccattcctctgttgagggacatatgggttctttccagcttctggttattataaataagactgctatgaacatagtggagcatgtgtccttattacaagttggagcatcttctggttatatacccaggagtggtataactgggtcctcaggtagtactatgtccaattttctgaggaaccgccaaactgatttccagagtggttgttaccaacttgcaatcccaccagcactggaggtatgttcctcttaaccaaccagtacccccagagctcccagggacgaaatcaccaaccaaagagtacacatggagagacccatgcctccagccacatatgtagcagaggatggctttatgggacatcgatgagaagagaagcccttggtcttgtgaaggctcagtgccccagtgtatttcaggacaaggaagcaggagtggatgggttagtgagcaggggaaggggctgagaatgggggggacagtttggaggggaaatgaggaaaggggataaagtttgaaatgtaaataaagaaaataataataataaaaaaagaaacagcagtaactgcaagagtgtgcttgaatgagagagctgtgtgtgtgtgaatgtgtgtgtgggtgtaagtgtgttagacagagccttgctgacgtcatacttgctgtgtagcccaggcttgcttagaactcttctgatccttcctgcttctgcctcctgagtgctggaattagagctgtgtatcactgtgtctgtaatatgcttacgtgtttttatttctgaggatgaaggagaattaagagcaagatggacagggctggcgggaaagcagatatgggtgaagagtggagagtaagccggaggaagtgcaagctgtgccctgcggataagcctgtggtttggcctccaaaaagagaagcacactttctccattgtctggaaaacggaagggaagcttgtctcgtgacaggaagggaagggactctttgcttatagctgcagttttatctggggcagagtgagaagatcatctggcaggaatacatgggaggttttgaagcaggacttacaagttttgaggtgtctacagctttttcctaattgatgatgggactgttgagattgcgtggtgctgggagtgttggagctgcttggcagtgttagggaccctggtgtagaggtgttgctctttacctgttattgctacaggcacaagagttatcagccgatggtcttagctttagagttgttggctaaattatttcagtgttttggccagtttcattaaacccaccatagattcttttggcattggagactgtttttgtacaatttaaaaatttaaaacatctattcaaaatccttgggtgcctgtaatattgtctgtaggatagaagtctgtagggcactgggtttcccagagccatttgccatctagactggtggagggggaccttttgtggtctgtggagtctaggtccaggctgtcttgctgggtgtggattagattgtgggctgatgctaatgtttccagagatgactaaagaggtgctcaggtgagcatacagtccctctgtgctcggttactgcctcagatctgactggggctgcccgctgcctgcggtgatctctgatggacaccataggttctagacccagtgtggagggacagggtagaggtcttcgctgatgatgatgactttctggttcttccccatcccgttctgtgtactgagtttcacagaggaaagctggcagtactcatccctggggcttgttgagcagcacgctttatgaatacttgactccgctccatgaagtcagcagtgctcgtggctgactctgcagcggagttgtgttgcaagcgtgcagtgctggcttcgctcttggctcttctttgctagaatccccgttcttgttttccttgcatctttcccacctatttaatttatgtcatttgattctatgtgtcagtatgattttcatagaacgagctgtggtaataaagtaaattttgagtctaaaaagaatgagcctttctgtttcatgattatatttaccctgcggtatcagataaatatctcctgtcctgtggtccctaatggagtattgatggggccggagagatggctcagtggttaaaagcactgactgcttttctagagacctgggttcaattcctacaccacatggcaacttataaccacctccaattccagttccaaaagatctgatgccattttctgtcctctttagggatctagtaaagaaatatgcacagacatacatgcagcagaacacccatacactgtatatgactcagtggataaagtttgccatacatggtaaggatcagaatttgagtcctggacctcacgtaaaactggacatggtagcgcatctgcagtcccagtgctcctactatgagatggagtttgaggcaagaggatccccagaagttggaacaagcagtgctcagcaccaagagatcctgtcttggtgagcaccagggtgagcacctttaatcacaacatttgggaggcaggtgaatctcaagttccaggccaggctggtctataaagtgagaagtcccaggccagccagtcaggcctacacaatgaaaccctgtctcaaaaaaaaaaaaaaaaaagtatttttttttaatccagcaattttatccttaggaaattattttagtgggactaatggatagaagcctgctgatgtttactctaacattgtttattgattaaaagattagaaaccatttaaatagcggtttggtttaatcatgttataacctcttagttgaatattatgcatgtgttaagtgattgtaatgatctgggcacaaaggtgttccaggtgtcttaatgtgctacagaaactgaatgaatatgtgtagaaaaagtggaagtttataaacttaaatattaatttatttcctatttagagggactgtatacatttttatatttttcagtcattatttttcttgaagttttaaaataatcaaatatgccgggcagtggtggtgcacacctgtaatcccagtactagggaggcagaggcaggaggatctctgtgagttcgaggccagtctggtctacagattgagttccaggacagccaggactacacagagaaaccctgtcttgaaaacctaaaacaaagaaacaaacaagtaaacaaatacaaccgggacaggcagagggtggagctggatcgccacgtatagaaatgtgcgtagcaaagcacagcgtctgccctgccttttgtagttaccacatactgatctatttcacggagtagacatgttacataaatggtagtttatggaattgatttggtgaacatgagaaacatgattgatttgatcatggaatatttaggaaggtggagggagaggccctttacccattcacagtgaaaccaggttgctttcctttctcactgcagaccagtcctcttctggagtctctgggtgttgggaggggtcttgaaagtatcccactcaatgcttctaatgttggggctcagggcggctctgtgtttcctaggtacttatgacttgagggactggatggggagctggtgcaatccttgagggtcagcgttccccttccggttctgctcagaccaagcgcacagctttgtggtgaacgacatcctaacctcagagcctaggctgtccacagtcttggtcagtgggtgactcttccttaggtattttaaagattttttggacacctcagattaaaacagactttgggcttgaaagaataaacttgtgaaatgtggcttagattggttttnnnnnnnnnnnnnnnnnnnnnnnnntccataagtaaaaatcatattttggggtaaattaattttatttaacgttggtttattattaaagtggcattattatatttcagagaactttaaaaaattagcattagggtagagcattaacattttccacacacaatggtgttttgttatcttttttctagatattgcctcatctagatctaacatgtagtatgctatcaaggtcattgttctggcagaatatggtagttgaagcaaaatgtcttccttccttccttccctccttccttcnnnnnnnnnnnnnnnnnnnnnnnnnnnnnnnnnnnnnnnnnnnnnnnnnnnnnnnnnccctccctcccttccttccctttttcttttccctttgtttttgtttttgtctgactatgtagccttcctggcctgggactccctatgtaggctagccaggctatcgttgaactcgcagctttccttcacatctgccttgagtgccttagactgtgtgccgagggagcagtgttctgtggtctctgcttgactggtcctcccttcagcaaagcttgtcagcatgtgcaacagggaaacaccattcctcctcgccgatttgtgttggttcagcagtatgtgaaattacattattcaggagggaaaaaaaacctacaaccctttcagagttaagctggaggaaattaatcaaatgttctagacaattctgaagaataactgagtttcatttcctgagggcaggaaaaaacatccccctcaaaaaaaaaaaaaaaaaaaaaaaaagcaaaaaaagcaaaaaacccaaaaatccaagccaaaccaaaggtcttatgtttcctagctcctattgatgggtggatggatcgattggtttttaagacaaagggtttctctgtgtggccctggctatcttggaaattgccttttagaccaggctggccttgaactcagagatctgtcagcctctgccccctgagtactgggactaaaggcgagcaccactgtgtcaggctccatcctagctccttgactgtgcagcctgctggtaaactgccattcagctgtgcatgggcggaaggaggggtgtcttcgccttatttgatttctgaaagtgtgtgtctccttcccctggccagaaaacactcctcctcacatgtgcactcccctctctcttcttacttgcagagcacacgggtggagtttgacttgccagaatattctgttcgtcggcgataccaggatttcgactggctgaggaacaaactggaagagtcgcagcccactcatctcattcccgtaggtagtaagtcactgctgcttgttctatcttttcccgagttagacccacacgggtagtgctcagttcttagcagtgatgggctcactcagcattttatactgaatgcactcaccaagagtgcatgcaagatagaggtgaagtgtctcacactctcagcttctactctgcactgccagcctgctaggtaaggtgggctggatttttacttttttcttttctcccatcctcctttctttcttttttttttaaatttttaatattttttattacgtattttcctcaattacatttccaatgctatcccaaaagtcccccataccatccccccatcctcctttctttaaaaaagaaaaaaaatacaaaacactatttatgtatgtgtgtgtgtatgtttgtgcatgtgtatatgtctgtgtgtgtttctgcacacacatgcatgtcataacacacatttgaagtcagagtgcaacttcaggagttggctcttgctttccacctggttgcatggtttctcttatttctgctgctccctgtagtcccggctgctggtgcgtgcgtgtggtgagtctcctgcctctgcctcccatctcagttgcaggagtgctggggttgcagatgtgcaccactgcatccagtttctcacatgggttccagagactgaacttggcctatggagcttttcagttagatcttttactacctgagccatctccccgctccctgtctctgtctctccatctgtcctctgtctctgtctgtctctctcttatgtggtactgagggttaaaccagggcactcatacttgctcttcatatgctctataccgagttggacccctactctttgaggcagagttttactaagctactcaagctggccttgagctcattttgtagcctaggagagctttgaacttggaggcagcgttagctccttcagtatttaggactacaggattacaccaccctgctcaagtttctttttcccagtacaagatattatcttatttctcaagctggcccagaactcactatctaacccaagttagcgtcaagcctgtggcaatcctcctgcctcagccctgtgtacagctatggtgcctggctctgattttcacttgtattattactgtctgtctctgtctgtctctgtctgtctgtctttatttttttgaaaagggaaatatcccaataccccacctctttaaaagactgaagtttggtagctgggcattctggtttacatctataattctggcactgaggaggtagaggcaggagtattactgtgagttcaaggtcatcttgggctacataatgagttccatcaagtctctgctactgtacgagacagtgtctggaaaaacaaacaacaacaaaaagcaaaaagattgatgcttggaagtgagtctcaccgaccaaaactgcttttcccacttggcagacattcttcttgaggtttggctgcctaccaagaaggcaaagccgacgcttcagattgtggccaatggggacaggaatctggcacaccatcccttcacaaccacagttttttatttaaaactcaagcaagaaaaccactcactcctctgtactgaagcaacgtgaatggacccaccccgtacaactccctgccccccccttctaaaatgggtgataactaaaattttaaagacctaataatcaatatacattgggtagttttccaaggcctttaagttaagataattattacttgtctttggagactttaggaaagtttagagcgtatgactattcaaaggccaatttatcctttgacaagaccttgattgactaaccccaggggctgcccagttcccagtcgtatcttcaccttctcacctctgtcacccaccatggctatgtgtgcagtgaatactggatgtttgtagggttttgaggtaaggtgatccctgtggccaggacagggctggaggcaatggggcccgcaggaatccgctgtccccagacttctcttttgccaccctaagtcctgtctggtcttttgagtctgcttctttacttttctgccctccagtcacttaagaacgtgcctgaaaaagaagcagccattttaaagcagtcggaacaagaccttaaaatagaatcctacttggccaaattggcagctagtggtaattttttttaaacatatgctttttatttcagaagagttttcgggttattgtaaaaataggagaacagggtttcccatactcagtacccagttgcattcatggctaacattctgcacagatgtgaaatgcttgtcccagttaatgggctagctggcgtcatcatttgataagctttgtttactcggtactttattccgaggtgagtattttgcctgatgtgtttcattccaggctccctaccaggacatcggtcatacataacccctttggcagtttttgcttgtaacagtttctcaagttttcctggtctttgacaacctttgacagttttggggtttgctagcaaggttcagtggacatttgtctcaaggttttcttggttagaccatgaagatggagtaaggtgtttaggagtagaaagccaccgcagtaaactgttaatccaggtcacatgacttaggggtttctgttctctctttgctctttgcagggaaactgttgcccaagccctgctcccctcttggctgttctgtttcttttctttctggtttggcacttgagactcaaaagctcgagagtgacacctgctggtaaaatgtagtgccaccagtctgtagctcccacgaggcagtgtatgtgtctctggaggatccagatagtcttctgtagtctccagaagactggagtctacagaagactggctgggcagtgtggtgggcagggaagtgctttagaagcaggcagagacttaagtttcttcacaagaccttgacccttagctgaagtagagagctttaattcagggaagtatttctgtttaaatagagaagtcaaatgaggaatgaacacatcatcctacagaaactgttagaagtcacctctcagtatctaagcagcagctgcgtcctcactagacccggtagctaatcttggtaggaacgtagatagggtgaagaattttaagatagacaagggacctctgcccgagaactgagtgtcgcctgtaaacagaggcggctgtctcatcagcgcagaggttaagagcacttgctcttcttgcagaggacccaggttctcaacatgtgcatggtggctcacagctgagtataactccagttccagggatccggcatcctctggtatccacagtcactgggcacacataggaaacatagacatacatgtaggtagaacccccatacacataaaaatatattttttaaagaaatctgaactaaaccttaacaaaaatggagaactaggtaagtgtgcggcataattattgtttaggttttgttgtctcctttaacagagaatttatttttaaattctttattagacttattttatgcgtgtttgcctgcatatatgcatgtgtaccatatgtgtgcttggtgtccaaggagctcacaagaatagatctctaggaactgcagttacagatggttgtgaatcagcacacggatgctggaatcaaacccatgtcctctgaaggcacaagtgctcttcatcaatgagttctgttttgttttgttttgttttgttttgttttgttttgttttgttttgatacaaggtttctctgtgtagtcctggccatcctgaactttctctggcttctaactcagactaggctggcctctaactcagagatttacctgcctctgcctcctgagtgctgggattaaaggcatgcgccatcaccacctgtctaagaccttatttttacttttatgtacatatgtgtgtgcccatggaggtcagaaaggggagccatattccttggggacagaattctatataggtgactgtgagctgccccatatgggtgctggaaactcagtctgggccctcagcaagagttgaatgcactcttagccaccgagccttctctctggccccatgatccctcctttttaaaaagtcccaccgaagccacatatgcacagcccagtcatttgaaatgtacgtttcaaagctttagtgtattcagatctgtagaacaaccaacaaatcagtgtcaggacctttcagcaccccagagggaaacctcaaagtcctcgctgtcactgtcctctctggagcctggtggcctcacctctgtctctcaggtgtcgtcttctttcttacattcagcatgttccaagggtcactcacagtggagcactggctaggacttccttcttaccgtaaggtgatagtctgtgtgtgagcataccacattttgtctgcccaccctcaaatggaattttgtttgttttctcctttggctcttaggcataatactgttacagacatttgtgtataagtcttcctgtggccaagtattatttatatggatgcagacctaggagtataattactaaattatatgttattctgcatgtaatcattcgaggtactgccagccttttgacatcccctcacatggtgtgtgagttctggtttctctacatcttcacaaacaatgattattatctgtctttaattatagctgtcctagtgggtgtgaggtgatatcataatgtgattttttttaaatttgcatttgcctgacaactgagaacatcctttgatgttcttggtggatatttgcatgtcttcttagagaaatgtctgttccatttaatttcttagagatttattttagttatgtatatgtttgtgggtatgtgagtgccagtgtccttggaagccagaggtgtggatgtcccttgtcactggagctggagttacaggtggttgtgagtcaccagacatgggtactaggaagcaaacctgtgccatctatttagtcccctctttgcccctttaaaaattaactctgtgtgcgtgtaagtaagtaaataaaggaactttagaatctattcaaattggttgtgaaacctaggggacggtggtcttgaggcatctgtcagtttacttctctctatcttagattagctgttgttaaacgtgaggatggctgtgctttctgatttgactgctgaggcagggagtgtggagataaaaccatttcttgaaaagaatgagagataaagttctggttgaacgattcccagcatgagcaggtccctgtgttccattccaggtccttgtggaggaaggggtgggacttgagtgaagccataggaagttgtagccagttaaatagtggctctgggaaagcacccagaggcgggatttgcttctccccatggactataatatacctgctttgtttccagtctctgactgcaaacttggcattctttatgggttctgatggaaaaaacacagtttgctccttagacccccccccccctttttttttttcctgaggagtcacaagatgatttataaattgattgactttcaattcagtcttttctactttggcttcacaaatcctggcctgcttaaagtatcatgcctgccccattcccacccccttttgtggttctgagggttaacagggctcctcccaccactgaaccacatcccaaacaatgcacatcacatgggctgtcaaagtcttcaaccctgacaaatgcctgcagaaaccattcagaaggaggaagaatgcgttttggtttaaagttcccaaccccgccctttagttggacccattgctctgagcctgaggcctgtaagagtatcccagcattgggggcatgtgtctgaagctgctcgcctcagagccaccagggagcagagcagagtaaggagggacccgggatagtgccatagacagcaacctgcttcctccagctagctttctgccaccttcccaaatagcaccacggcctagggaccaagcctttaacttgtgagtctgtaggggaaattacagcttcaaaacctacagagccctctgatgtcttgcaatgtttttgctttcttttatattgctttgctcctctggaattctaaaagcagaaagaagtcaccatatgtgctgggagctggaggtgtgtggtgtggagtgtttgctctttgtagagacagtttcctcttttttatcatgtaatggtggcgtcagaaaatctggaatagaggctttgccccacgttgtttctctctaagttgatgtacattaatacacatgtacattttacatgtggacagtttcgtgagtgtgttaccacagtcaagacatacctatccccttccgaagtatccttgtgcgtatgaatacttaacatgatatatcccataacaaattataaaaatataatctttgtatttattctctgagaactaaaattacgtttctttttgttctgttttacctttttttttcctcggcagtattagagatcaaacctagggtctcccaccttccaccgggctacagcctgagctctttcatagcataggcctaagtgcacagaatgctgtacactggagaggctttatcatgtatagcactgaatgtatatgagttaagtagctccctccccaccccaggcagccatcatcctttgctgtgcgcactacatgtgctcactggcctcgctgctgctttgctcccttggctcattgcacagcagacacatggacaattagacgggcacacacaggctctggagatgagatattttacgttcatttatcgaacactttggtgttcagtttgacttgcaaaatgaaggtttgcttttcctgaaggacaaaggatgtatctcctatgcagctttcccctcactggacttaacgagaagagtttgtattaaaacaannnnnnnnnnnnnnnnnnnnnnnnnnnnnnnnnnnnnnnnnnnnnnnnnnnnnnnnnnnnnnnnnnnnnnnnnnnnnnnnnnnnnnnnnnnnnnnnnnnnnnnnnnnnnnnnnnnnnnnnnnnnnnnnnnnnnnnnnnnnnnnnnnnnnnnnnnnnnnnnnnnnnnnnnnnnnnnnnnnnnnnnnnnnnnnnnnnnnnnnnnnnnnnnnnnnnnnnnnnnnnnnnnnnnnnnnnnnnnnnnnnnnnnnnnnnnnnnnnnnnnnnnnnnnnnnnnnnnnnnnnnnnnnnnnnnnnnnnnnnnnnnnnnnnnnnnnnnnnnnnnnnnnnnnnnnnnnnnnnnnnnnnnnnnnnnnnnnnnnnnnnnnnnnnnnnnnnnnnnnnnnnnnnnnnnnnnnnnnnnnnnnnnnnnnnnnnnnnnnnnnnnnnnnnnnnnnnnnnnnnnnnnnnnnnnnnnnnnnnnnnnnnnnnnnnnnnnnnnnnnnnnnnnnnnnnnnnnnnnnnnnnnnnnnnnnnnnnnnnnnnnnnnnnnnnnnnnnnnnnnnnnnnnnnnnnnnnnnnnnnnnnnnnnnnnnnnnnnnnnnnnnnnnnnnnnnnnnnnnnnnnnnnnnnnnnnnnnnnnnnnnnnnnnnnnnnnnnnnnnnnnnnnnnnnnnnnnnnnnnnnnnnnnnnnnnnnnnnnnnnnnnnnnnnnnnnnnnnnnnnnnnnnnnnnnnnnnnnnnnnnnnnnnnnnnnnnnnnnnnnnnnnnnnnnnnnnnnnnnnnnnnnnnnnnnnnnnnnnnnnnnnnnnnnnnnnnnnnnnnnnnnnnnnnnnnnnnnnnnnnnnnnnnnnnnnnnnnnnnnnnnnnnnnnnnnnnnnnnnnnnnnnnnnnnnnnnnnnnnnnnnnnnnnnnnnnnnnnnnnnnnnnnnnnnnnnnnnnnnnnnnnnnnnnnnnnnnnnnnnnnnnnnnnnnnnnnnnnnnnnnnnnnnnnnnnnnnnnnnnnnnnnnnnnnnnnnnnnnnnnnnnnnnnnnnnnnnnnnnnnnnnnnnnnnnnnnnnnnnnnnnnnnnnnnnnnnnnnnnnnnnnnnnnnnnnnnnnnnnnnnnnnnnnnnnnnnnnnnnnnnnnnnnnnnnnnnnnnnnnnnnnnnnnnnnnnnnnnnnnnnnnnnnnnnnnnnnnnnnnnnnnnnnnnnnnnnnnnnnnnnnnnnnnnnnnnnnnnnnnnnnnnnnnnnnnnnnnnnnnnnnnnnnnnnnnnnnnnnnnnnnnnnnnnnnnnnnnnnnnnnnnnnnnnnnnnnnnnnnnnnnnnnnnnnnnnnnnnnnnnnnnnnnnnnnnnnnnnnnnnnnnnnnnnnnnnnnnnnnnnnnnnnnnnnnnnnnnnnnnnnnnnnnnnnnnnnnnnnnnnnnnnnnnnnnnnnnnnnnnnnnnnnnnnnnnnnnnnnnnnncactggcttacagtctttctagcagataccctgctgcataacagggttatttagcagatctgctttcagtttttttaaatggatttttatgcatggattaaacacattagtgactatctctgagtcaccaataatgcatcggtattgaatgaaggaaagaatgttcccttggtgtgatttaaccaagaatggtccagatttgaattctctatgttccccgagtcttctgtcctctcttgtgtgatgtgaatctgtgcctgcctgaaagctgtcttgttaatatgtccctgtgtctgtgtcttctgagtctgtcagttgtatgagctgcgtggctatgcttaaacaaaggacttcattctgtgtttcttcaacagcacagaaagcatcacgtgggaaggaatggggtactttacagaaatcttcaacagagttttacaaggaattacatcactggctccatctgatggagactctaaacacttctagaaacattgttgagcaatcagtatccatgcatattgcactcaacctttttggtagattttagataattgctttcagtctctgttcttgctgcattcagcaaatgatgcacatgcattgttctgagacaggggcatggactagtatgtaatttaagattgcagctatgcattagtttagattgtaaaagctgattacatgaaaagcccaaggcaagtgagatggctattacattgttctcttaaaggcaggctacacagatagagcatagtaggctagccctcaagacataagtgaactcaggtgtgttgttaattctggctacacagtcgagaaagagtcgcagactcttaaaatacaagagatattttcaggatcttgggatggttttgtttgttgtttttgttgttgagacagtcttacagtgcagccttggatggcctggaactcggagatcttcctgcctctgctctctggagtgctaggattaaagacgttactttgctatcaagggaaggcagtttttagtttactgcagaaactccactgggtttcattataacaactggttcacctccctacggtgtaggcaggtaaggctttcctcttgtctatatcctcccaaacttttgaatttaattttatttttgtcagaatgcaaatatttttaggttgtacatagtagtcacttttccctgtcgagaagtaaaaaagacacctttaactacgtgcttgagcaagctaccaaggaaataaattgaagatcaaaggtccctgggtgagcgggtaatttaaattgttcaacagtatctgctcacagatttatgatagagaaatttgattgaatgagagaagcaaagaaaagtacattttgattacaaacctaaaagggaaattaacaccgtcttcagctgtgggagtgtgcctacttccttatttctttatttactgtgttcttgtaccctgtgaactgggaacaaaatcttaatctattttaatacatttttttgcgctcaatattgtctgccccccttctttagtgtatctttgtgtgtctgtatgtgtgtagggtagctagtgtaggtacgtgtgtctctggctgtgtgggcatggaggactgccctgggtggtgttcctctgacattttctacccctttcctttcttttttgggggaagagtgggggtgggggtaggtggacacatagtttttctttcacagggcagtagcttacggagtaggcaaggctggctgcccagtgagccccaaggagctgcctgtctctgcggtctcagcactgtgccacagatacgcaccactacgcctggccttcatttaaaacgtgggttccgggacttgaactcagatccctgtacttgtactgtaggtactttcccaactacagtgtctgcccggcctttgctctcttttcctagactttgtctttcccctttctctttgtaccttctctgcgtctgtggacagagcagctgcatttcctgaacaggtgttggcttctcggtctgtcaggggcttgtgtgatagtgttttgtgctgacagggcacttgtgatttgctgcagctgcaggtcccaagaatctttgatgataacataaagatctaacagattagaactactgttcgtgggttggaaatgtagctcagttggtaaagtgcccggcataaagtgaccgggtactaaaatgtagtctcaggctgagggtgagggcagaagttcaaggtcatcttcaggcacatatcgagtttaaagctaacctggactatatgagatcctgccttgacacccaactctgttcttggacagactggcaggagggatttggtggcctggtcagcttcccatgctcccgtgctcccacactcccatgctcccgtgctccctcgtgattacgttttgatgactctgttgtcctcttgtcttctagccgcttcctgagaagtttgtggtgaagggtgttgtggatcgcttctcagaagagtttgtggagaccagaagaaaagcgctggacaaattcctaaaaaggattacagatcaccccgtgctctctttcaatgaacacttcaatgtgttcctcactgctaaggtacaggcaggattttgtgtgtgtccctctaaatgctcgttctcaggctcctcgaacactgctttgctcttccacgagccacttccacttgtggtcccctgagctggacatcacaaaggccttctactttcctggtgcccgttgcattggcacagtttcttttagaatctggcaggataataggctgcacccccctttgcagcagcaatgaaagtcaatgttctcacttaccaaaagcagaagtgcccattaaacacttcttggcagtgttagtaggttggcaggcttaccaacaataggcacaaaagagaaagcattccgagtgtttggtaagagtgttcttcagggctggcaagatggttcagtgggtcaggtattcactacaaagacctaaggagccaagtgttctcttcagggcccatgtaaatgtgaaaagactcagttctacaaggttgatctctgacctccacatgccagatacttatacaccaaggtgtgcacaaaggtccttgcacccacagagtaccagggaaccaggaatattaaacacaaagagtcctctcctcaaaagaggaattagctgtttttcagccagaagactgggagtggacattgttaaccatctggtgactttttttttttttctgtctgtagaggtagacctcacccaccttttgctgtagagacagacctcacccaaatcacccaaaaatgtttatcccaccagactgttaatctttagttcccagttaatagaacccattcttaggggggctgtcacatgtgctttctggcctctgtgctgggttggtcagagagcacagcagattctaagccttctaacgacagaacccacccaccgtcatggcactcggactttttaaacagtgtctgtgtagtcacgccttaagctttattgtgtacctggaattggagtgactttcctggaaacgttttcccaaactgtactgtgttttaaatgtgccaataacgaatgacctggcatcagactccccaggtttgatctaggttgatgacgtcagcctgagcagaggttgttgtttttttttttttcttcactttaaattcatttaatcttcccactcacttacatttacttcgttgttattcattaaggcatagattttgttcaagaaaccagtaggaattcccagcaccacactggcaaagccagcctccttatcaagtggattttgatggagccgagtttttattcttacctgttcacagtcacttccctgtctgagcacctgcggagtggcactcaagaaccttgaaagtaaccagcttcatttttcaggcaaggaaactgaagttcagagagattaaacgtgttcagtcaacatcactaggacttgaagtcgggtcctgtggctcgtaaggcccctctttctagctcacaaggcctggccattgcttgctgacaactcggttcctctgttccagtcatttgccagaaaagcagttgccttccagtgtgttcctagactgttcaagctcaggttgcttgttcactggctttgtgcttcacttgctgttggcagaactggcctgaaatctaaggcagtccactcatactgtgcagaaatggggtcacatgctcagactcgcaggcactcagcttctcccaagccaacccattcagttcagatctgtgcatcaagccatatataatgacaaaggtttgaagtttaggttttgggtttttggtttgggttttttttttggggggggggtgttaaaatgacaagaaaacagagacatgtgtacagatagcagctgctgacatttaaggctcccagaagattctgttctctactcatggaaactacctggcaaagtccagtttttgtttttagcttcagtcggtggctgcccatgcactagcccccccctacaggttgaacctgtttaaatgtaagcatttctcagcatactgatgcttgggtgtggttcttccagtttcttgttttcccaaagtgaaggttggctctgaggttgcaggtcctttgttccgaagccccaggccatcctcattactgatgaagtaggagagggctgtggcttggattcctggtcattaggactctgcatgaagagtcagtgggagcttgtgtgtatcttggagagagatgaattgagacttctgggctaaacagtgtgacaaagattttatttaaagatgagtaataaggtccttcagtgtctccatcaaaatccagttttgggctagagagattgctcagtggttaagagcatcaactgcttttctggaggtcctgagttcaaatcccagcaatcacatgatggctcacaaccatccataatgagatctaatgccctcttctgatgtgtctgaagacagctacagtgtactcacatataataaataaataaatcttaaaaaaaaatccagtttcatgcaaggaagtacaagcgagcagcccttaaatcaatgtcttctacttgggcttgggctggtgaacatgtttaatcctagcatgtggaaggtggaggcaggaggatcaggaattcatcctcagctctgtagtgaagtgagggccagcctgagctccgtgaatccctgtctgaaggagcagagctttctgtgcttagagagtggagacgctacactcagagacagcagctctttctccctactaactctcctgtgttcgcctttaacatactgtcgcgtaaacttccctgcagggagatgtcaagaaacatctattatttcccaagacagaagacctatgacagaacaatataatgattcctccagagctaagacagtggaggtgttgggttttatctacagccccccagggaaggggttactcacaggagcatgtgtgactgaaacagcctcacagctgtctcaccccagtgcaggccatgccttccctgtagttgtgccgatgagcctccccatcagcttctgtgctgtgtgtaagctcactccaactacaaaggagagctacgtacagatgtcaaggaagtagaggaaggaacggatagtgtctcaggtaagggtctgatgatcttcctcctatgaggagcaacaggcctgatcttgacaagggtcccttgggtagtcacagctgctagattcaggcactaggctgggaagggaagtgttttatagtgtgcactgaggccaagatcttagatgaagcacttctgtgcagcatttataagacagccctcttggtgatagcatgccctcatcccaaactagacatgtccccaagaagaagccagtggtgctgggagactcatgggaagtgatgggagcaggaggcttgttcccctgacaggctgtatacacttttggttgttgctgttttgagatagggtctgtggtggttggaataaaagaatgcctcccctctccaatgcgttcatacatttgaatgcttagtcatcagaaaatggcactatttgaaaaggattgggaggtgtggccttgttggaggaagtgtttcatgtgggctttgacatttcaaaagcccataccaggcccagtgtctgtcagtatatttgtctcccaaccagtggatcacgatcaggatctgtctgtctgtctgtctgtctgtcttttccagtggatcaggatgtagctcttggctgcttcttcagcaccatgcatgtcactgtgctccctactatgacaatactggtctacacctcagaaactgcaagcaagccccagttgaaagccttcttttgtaagagttgctttggtcctggtgtctcgtcacagcagcagagcagtggtgatggcaggcctcactctgtagcccatgctagcttgagcgcccgctccttatttctcagcccccactgctggaatgatccataggcaccaccggctcagccctaagagctgtttgcttgtttgtttggtgggttagcttgaggcacagagtcttactgtgtagaccaggctggccttgaactcacagagattcactacctctacctcgtgagtgtagttaatgccaattgtaacctcgtggttttccagccatccagaaatggtgactctgagacatatttcatgaataaatacctaagccaaagctttgcttgttcccggactacctcttagcttaattgcttatttactctattctaagccatgccatgtggctggctacctggtcttcagtttcccgtggctgtcttctgtgtctggggcaaatcttttcacgtctgattctattcccagaaatcctctctgtgtactggaactcgcagctccctgtttcctgcctaatctagcaggccataggcttttgtattgacaggtggatgcttccacacatagaacaaaggttccctctacacctcagtgctggaaccaatggtgtgagccaccatgctgggtgctttatcttttaaaattcagacacaagaggtttaaaggcccaacccatttcccattttttgcctttacccacaggaaattctgatttcaaaagtgtctgcagtgtcagtccctgcagtgagttttctagcagcgcttctgtgacttctcagctcccgcccctccacctccttctgtggctctagttgggtttgagtgaggaatgagatgaccctcggacatttaattttgtcctaaagacagtacaggatctgtcagaggtttttaaaaaattgtgttaggaagaatgttgttgcatttaaagatgggggaatatttggttctcaaccttcctagtgctgggacctttaatacaggcctcccccagtcaaaactaccttcgctgcttcttcataacagtaattttgctgctgttatgacttactatgtaaatacctggtatgcagggccctgtctagaggttatgacttattatgtaaatacctggtatgcagggcccctgtctggaggtcatttgacacacctccaagggctcataagccataggttgagagccactggactggagggtctggagcccagccatgctgacagggaatctgggcatgagcttgtggctgtgagtctggagcagtctactgtagaatgctctccttcaagccaccgtgtggtcacagtagctgtgaattttaagagtggggcctggtggctcctgataatccatcataggaggatgggtatgtgtgctaggtggggctttgttgggccctcacttcatctcagccactcccccttttacttcacagatagctgtatataattcttcctaattgcgtgtggccttatggccttgggagatgctagtgtatatagactctagacattagccgaggagagattccatctttgcagctttggggaagtcatcatccaggctagggtgaggctttcttgtggcatggctcctcaatttggactttagacttgtattttgggttgtcctatatgggtaggcagatgtttgtttggcctccacaggatgagagttcccacagtggggctacgatgtgtacatggccctcacaactcctgctttctagttcttcatttccaatgagacactgactttagaagctggttcccttagccctggctgtctgactgaggttgtgttgttgtctgcaggacctgaatgcctacaagaagcaagggatagcattgctgagcagagtgggtgagtcagtcaagcacgtcaccggaggctataagctgaggagtcggcctctggagtttgcggccatcagcgactacttagacacttttgcactcaaactgggaaccattgatcggatagcccagcggatcatcaaggaagaaataggtgagctctttgttgagattggtggtgcccagagtggcaggaatggcgttcattttgctgtgctgaagcaacctgcagacattctgcagtgacagaaccaggccttattctgcttaaaaaccagatacaagggggaggggctggtggtgcctggaatgcgttttgcactcagcccttgtcactttgcactcagtccttgcagtcagcgtggtgtttgctgttcccatgcctcatccatggggctgatgattacagaaataaacgtagctgagagatggctcaaaagaagagtgtggtgcccgctcttgccaaggttatgacccagtgagcttttgaacttagcatctgctcctccctgccccgcatcgcttcatatcctctcctctgtccttgtcaccactgcctgtctgcctcctcctgtcatggtctcttacttaactttgtccctttccacaggtgtgggcagacacctgaacaatgtaatagccatgctgaaacttgatgcacatcacacaggcctgttcagttaaacaacagcggccatgttctgtcaaatgacaggaaccctgagacaaatggaggactgggtttactcttgtaggggtgaagaaataaattttttttcttattccctgaaaccactgatagaaccattgagcaagggagcgagttgcctctatgagaccacatctctttcagcagattgttcccataattccattgtttttccattgtgactgatttttttccatttaaaaaaaaaaacccaccctcaagtactagagatataactcaggttaagaacacttgttgctcttgaagaggactcaaattcagttcctagcacctgcattgtggctcacaaccatctataactcaagttccaggggctccctcattgctttgcaaagcatttcacttgcagtattatgagtgggggtaattatttttgaagaagtttgttggatttggctcttaaccatcttctcccataaggtattttggttcctagtaacaagagtcccagatttgtatgctagcaataatttatattagcttttaggtattaagaaaatgttgggaatatattacacttaaaggggagtgtgtccaggaaagacaaaagccaaggctgtgtgtcctaatgtagggaggtctgggctgtggatccggagtcagtcacaccagtgggtgctcccctgccagattccaattcctctcttcctctagagtacctggtagagctgagggagtacgggcctgtgtattccacctggagcgccttggaaggcgagctggccgagcccctggagggagtgtcagcctgcattgggaactgctccacagccttggaagagctgacagatgacataacagaagagtttctgccagtgctcagggaatacgttctgtactctgactccatgaaggtaagctggcttgctttttgcacactcaccaagagcctgtggattattgcctgtttgcatgtggtatacatccctttgtagttgagaagactaccaaggtcatataaatagaacatgtggtgaacagagggtgtgaattaagtggaagaacaggttagaagaaatgttctcaatgttcttatactgggaaaataaaatagctcctaatcaggagtggacactgtggaggaaggatggtcagataactttgagaattaaaaacacaatttgttggggctggagggatggctcagtggttaagagcactggctgccctttcagaggatttgacttcaattcccagcacctacatggtggctctcaattgttgtaggtcctgtccccagaatccttttctagcctcctcagcccactggccttacatgctgcacagacataagtgggaaaagcacccatatgcctacaaacttagtttaaaggtatatgattggaaagtgcagtttgaggaaatcttagaaagtaagaccaaaaaaggaagttgtttgatggtgagatacaactgcaaacatgtaaaactgtttgggtggggacattatatgttttatctcaaggttcctgagaattcctaatttagagaacaggaaaaccacgggagggaaactgaggaagagataacttaagggagaatgagggcatgtatgaaaggcagaagagcaaaaaaagctttggctcagtggcaatcgagagcacagcgatctgaatacagcatcaggatggaaggttctcatgcccacgcggtggctcccagagactgcctgagaacgcagtttcagggggcacccggcagagaaaggatctgtctttcaaaagttcgggaggctgtgtgttgaaagcccacttccaagcaacccccttcaggttgccaaggatggccccagctctgatcctcctacttacaagcagatacatactgtactaactacaattgacaatttttttaatagaggctgaaaatccaaaacttctggcctcaaacctgttgcttttttacaatagatatagataggtagatgaaaggaagaatttctttttctattttattttattttattttattttattttattttattttattttatttgaaaaggaagaatttctaatgtgtggctgaagtaagacctcccgaaattaggaaatgaaccaaaatgttttcactttgcttacaaggttcacagtgcttgcttttgtaaacaaaaagtaacttttccaatcccgggtgtttgggtggatttgactctcgtgcacacaccgcctttatcaggatgctccccaaccttgctcagacagaatccaatacgtgcacagttttagggattttctattctagcatgtggtaaatatgttaatactcaatatacatttgtggttagagcagggttttacattgctgttaagcaaagatttatctggtgtcttaattagagcatggactgcagtgtgaggcatgaggttgccagagcaactgagacacagcaaggaagtagtgggttgttcctcttcttcaccccatgtgtgaagcactgtactaagtttcttaatcattgatccctgaaatactgcagtcaggttagtggggcaggaaggaggatttactacagtgtcgaggggaaggcatggggaagaggaagggttgattggcagcctctgaggctggagctctggcccagtgccggctgaggtaaataagtaaaggagaagacggctcagggatgcgcagggtgaggccacggcagagccagcattgacctaaggttgttgagatccaaggtgctcggataagatttgcagacagtgatgcatgtcttcattggttcccttgaatattcatgctgcctaaaaagtctgtttccacattttacttccctaagagagttcttttcaaaaaagctttctgatcttttattttgagacgagatctctgtgtgtagccctggctggccaggaactctgtgtacagaccaggctgaccctgaattctcagagatcctcctgcttctgccttctaaagtgcaggattaaaggtgtacactaccatgcttggcgaacattctggtgttctatatttgtgtgagaggctttggagtttgctaggaaaagggaaattgagagtgggtttactggaggcctggatgagatcgtttgctgcaagtgctgggtggcctgcaggattaagcaggtcccactgactttgcttccagggtagttattggtgctagctttggatggaccagagggagtctttgaggaaacctctttctcttcccaccatttgtgagctccctgccacaccattggaaggcatgggcttgagcttgggggcgtgtagtgtgatctctgctgtataccctcaactgtggtattttcttggaaaaaaatccagtgttgatgttggaagtcaaagcacggaatgtgcctgtgcctcctccgggtcactccgtcatggtaggcagaaggctgcttgccacaaacctgacacagttgacaattctaagtctcctgttgctactgttggtttattgaaagcgttttggatgacaggcattatgtttgtattgtttgatgattctttgtagaaaatttccaacatgtccagagaggatgggggcgagggtagcagaaacaggagggttgctggggtttgcagagggagagacacagaagatttaaaaaaccagtttcttaaactatggtcacatatttagtagtactcaaattgtctcacataatttttatagttctttcccccaaatccatcagaatccatatatttattgataggtttcttaaatattttataatttctttccatttttaaaaattgttttcctcaacattttcttgttaaaagtgagcattaagctgagtcattagcttcttttcatcttcacagcacactagtgacgtttcagatttttagggccagttaaagtcatgctgaagtgctccacttctggacatgctatccaagacaagctcattctgtctcgaattaaattcaccctgtccccaaatccccagtccttctcacatttggtgacacatggtgacacttcacgctgccttcaatactgttttcttgtttgttgtctgcccctcctcctctggcatggaagctctaccgaggcaaagctgtcttgtttgttctctgcctctaaattgatgaatcaggatacccaaaaggcagaagcaggggaggaaaactagtgacatggagagaggctcaggtggcaggaggggaactctgtagatagagcctcttggctttcaccccattatatagggtcaaccctttctgtcataagctggtttggccagctgtacccacagatactgttatgagagtggggagccatctttaacgtggccagcagtgtatagagcggtccctagagaagatgcctaatcttcagcatggttgggttatggtcagactgtgaaactttagtcagaagatggtggaaactgagttgctgctgtcctaccatccagcagtgtggcctcagacaggtcctatattgtcaccatgccaagtgtcctaatttagacagtaggttctatgtccttcacctccaccagggtgttggcagccttttatgctgcccagtgattctgggatgtaagcccaggtccttccacatgcctgctcatggagacaacattccactcgctccaggagagctggggtgacacaagctcagacagaagagccgcccagaccaagtggaaagcgaggcatgacatcatccgaggtcctcttgctctccttgtgggatggcatgagtagatggatgatggtaaccatcccaagtgatgcatcttctcccacatccccccttcaggagtctcagcatcctcagccaagtgatactgtaagaaacgggagagaaaaccacacactgggctgacagtcccaaggcatcgtctcaagaatgctggttctgagattcctgtcacaccaacaggggcatgtctgtgcagcgtcattcctggagtgctagactgaaaatgatgtcttttccagtaagatgtgcagcgttctgtgaagggggtgtgtatacacagacagacagacagacagacagacagacagacggccattatcatcatgtgtttatttctcttgggtggagatgatgatgtcagtattcctggtaccagaccagtagttttaggttatagcctatgctttgtgaaatcagaaatgacccatggtttttgttattttcctttatagatttacctagtctaatgtggtacccactggccataaaaagacttatttaactttaaatttaaataaataaataaaacacacacacacacacacacacacacacacacatccatttcctcagtcacacgagctacatgtcaggtacttgataggcagatggggcttgtgacagctgtgttagagcatgtttctgtcaccacagaaagctctgttggtgactgtgtggagcacttaggagaaagtaaatgggaggtgaatgatggcagggtctaatgtgcagaagacttcagttgccgtcccagtgatgagttcctttagaagatgggccttgagggcccttggctgttcagtcacccagcactcctgagtgtcagcagggacaccaagtgcctaacacttagtgccccaggcatggggccttcctgccctctctccatgctgttaggaggacctgtcttggtaacctgtggcttcagaggcagtgggtagaaaggctctcactatgttccttgctggccatttttcaatgtactgtaaggttgaggggagaacagagctgtgcttcttcaactgcaagctttttgcctggccctgagggtctgcatagcagtgctgaggccgaggggaggaaagggaagctggtgcgcaggctcaaggggatgttccctctctggtgctgcctgctagcatggacagaacagtgaacgtgaccttatgcctgtcacctgagctcctggctcgcctcatctctgtctatcccaggctggatgtcactgggcccatctgcccctcctccttgcaagcttgctatatgaatcgaggggctcagacgcatcactcagaactcttgtacacacatcctcttccatatccggatctctctcagactgaaccgttgcatagggactgagtctcccgcatcctttacctggctcagaatagagaacaaacaatgggcagatcagtctaccaggcatcagctaacagatgagagtctcaagaactctcttataatcgttctatagcatagtgagggtagctgattagtgtattcatgaaaattgctgaggagagatttaaatgccttcaccacaaaaaaataagtatgaggtaatgtctcttaattagctcaatttagccatactataataggcatgtattttggaatactttatgcagagtaaatatgtatgatttttgtcaattatataagttaataataataattaagaactgtctttgctaagagttttccactgaacccagagtagccctgcattttaagcataaagcttagcgtctgcccgaggtctttgaacgtggtgaagatgaggcccccagcagtgtggcagtggtgccaatcttcctgacttgcccttttcaaaattgttgctgtcaacatctggcgggttactccccggcaagcccaccctccagagttggctctccttccttccctcctgtcctcagagctggtgtggtatgcgcatggtgttatggttcagggcactgtgatttggggaggacttggggatgaagactggtacatgcttctctctacctcccacagggtgtattgaagaagagggaccaagttcaagcagagtacgaagccaaactggaagctgtggctctgaggaaggaagagcgtcccaaggtcaggagaacacccagccgagggtgggccaagctgcaggctccctgcggctgctgccttgtccttagatggaaggatagaatctgttctatctattggttattctgtttcttacttgttcgtgatccaaagttgtatttctgttcacagagaggatgggaatagggaatgttattaagaagaaaatggtaaagaccaatgttcgggccaataattggatgttagaactgtcactcacctgtcctctccttcctggaacagacttgggaaatgtaaaacccagaccagacctcagagataacactccttccctttgtttatgctttttaaaaaatttagttgcctcacatgatactgtgctagtcatctgggactcagagggggtggagaagtgagtcacagaggagctctggggattgcctggtctttcggggtgcagatgtgtctgtatccagtatgccgtaatagcaggtggatgcaagtctgctacgttgattcgtgtgttaccatggatccacactagaatttgaaagctgcctgcatcttacatgaatctctggtcttgctctgagaaggaaataggtaggggtttacatgttagtgcatgtaaatgccctatctgtcctgcccacaaaaagaactcaagaatatatatttgtaatgtatttcaagaggacttaggataccaccctgcactgcaatacacaaaacagagtttgaacactgaacaaataagcaaacagcaagaaccctgggtgccgtacagaccactacatccgacatggaggagcctgtgtgagcactgtagcttgtcctccattcagacattttttgccacctgaggcctaacaggtggtccaatcccccaatcttttgtaccttgggatagacagcactcatccattatccttggatattgccatcccaatgtcagtcagacacaggaacacatgactgcctcggtcacagaacaagagtattgaaacaaggaggaaatccaggtgttccttgtcagttaatcgtcataaaaacccacaagcaagaaacagtcacagtgtctgtcagctacttgcaagcctgagcgcccagctgtcagcagtcctggcatccataagttgggcaacttcacaaggaaaggtgccgagtccttcagccctgtccacgccatgttgacattgctctggttggtagatagtgactcaaactcctgtagcttggggacatttgggctcagtggtctggggacttaaaactttcaaggtttaagcaccatttgcctctggcacggaacacttgagctatgacagaaaacctggcttaggagaaccagcatgaccaggagaccctccctagccatgtgagatgaatgtaccttaccacagcaaagggacggtcacaaaactcagggacacatgtcctttctaaaccataagaaaaacctgaagccacttgctatattatgcttcaaaactttaatacccttcagggattttttttcctttgttcttgagctctgtggttaactgccacccagagtgcagaatggtgccccgtttatgtgtgatggggagttcagaggacctggctggtaaactccttattcaattcactcagataaataaggtaaggtgttatcagacatcataagtattgggctagctcatgtgaccagaacaggaaccccttctcctctagttctgacacaaggcgacactgtgcccagggctgtttgtcagcatggctgagtaaatcctaaaggggctccacaccgccttactctgacacgaaggaatggttcccccatgtgtctgctctgctcggttgggtcagatgattcttggggcaggacagtgccttttacaaacccttccagggcctgctttccagggagcctctgacattctaattgagaacagtgtttgtggaggaggagaacccagtcacactttggagccaaggatatgtcttccttccaggtgccagcagatgtggagaagtgccaggataggatggagtgcttcaacgctgacctgaaggctgatatggagaggtggcagagcaacaagcggcacgacttccggcagctgctcgtgggcttggctgacaagaatatccagtattatgagaaggtgaacacatgccactgtgcttcccaggagctacggcctttcacgggcattgccttacttagggatttactgctgtgagcagacaccacgaccagggcaactcttataaggacaacatgtaattggggctggcttaccagttcagaggttcagtccattatcatcaaggcgggaacatggcagtgtccaggcaggcgtggtgcaggagctaagagttctgtacttcatctgaaggctgctaggggaagactggcttccaggcagctaggatgagggtcttaaagcccatatccacagtgacacacctactccaacaaggccacacctccaaatagtgccactccctgagctaagcatatacaaactaccaccggtgtcttccagatcccccacgtcccatccctaacctgcctcatgtgagctaccccagttccctggcagactgtgctgagtttcaaagctcagacacccactctcctaggcctcctcctgctggaggaagtggctctgtgactgggcagctgcttcccggtgataccagcatgtgggcacccccagttaatggagcctttggggttacttcatgttaccttgtggttttacataaaggtgtcttcactctcactatgctgtgggcccctccagtcatctgttgaagctgacaaacatcagacacaccagaagaaggaattaggtcccattacagatggttgtgagtcaccatgagctgaactcaggacctctagaagcagtcaggtgctctgaactgctgagtcatttccccagaccacactaatacttgttgttaatgttgaactttaaaacattctttgtggacctcagagttagcattcccattaacacacacacacacacacacacacacaaggagaggataaaagagccaactcctaaaatcaaggtccattccttatgtatctaatttggagtcatttctagcaataagtcctgatgtccttttgtagcctaaacttacagttaagcaatggcccagttttagttgaaatagcttggccttgaaattcagctgttgggaacagaacagaaccctgtaggacgatgctagagataggcctctctcctagattgtggccctaggactgttgagctaaatctccaatcccaataagcccaaataagtacaaacagcacacaactcagtcataatgtttataagctgcacgcctagattgggcagatctaccactacactgctctcttccccagccatgaaatcccttgctacttgcggttcctccagaccacgtggttctgttccatcttccttccatctcttcttccttgtcctcctctctctcctccatctccttgtctccccctcctcctttaccctctctaaaactcccagccccaccttttccttcctctgctcaatcacgggctctaatctttgtttggcctgttaaaatggggagacgtttcacctgagatcacctcttgtggaagcataattagcatcaaaatacaaactgcaccagggcaatccacacagaacagtccttggcccctgctgtcttgaggcttaggtggttgtggctgctgctctgagcagatgtgcccgcactcggcctggtttactaaagggagctgggggagaaagccgcccactactcttccacaccttttctctggagtccctactacttctgaactggattagctctgtgcttagcagttgccagctcattaaatttaactcttcatcctgccaagcggtgtaggtatcagaggagccctgagtgagccaaagtcctgagtgtatgtgcattgttgacccattccaaggaccccgaagcctccaacccatagatgcatttcatcctatgtgccaggcatgggggacagcaaagctttccttagggtttgagtatgagtgtttgtgaataattgatcagggtgttcgaagactagaactgctgcttcctcctagatgtttgtagcaggagatcttcagatactagcaacccctccccctatgctattcctaataaactcactgaggttccatgttgctggcagtatgagccctcaatcacaatgaacacacaccctcctgatccgagctttgctgtgtgtgtgtctgtgtgtctctcctttctcccttcacgtctagtcaggattgcaggactcaggactccgagggtcacggcaggtagtgtgatagagagaattttatgactgaaaccatcattcacagaagtttaaaaattcctcccaagctgaccagtcttggagtaccaaactaagtatttaactgatggaatcatcagtctggattgtccccacccaaccagcttaggagaacaggggtcatacactgttggcgacaggtagaatgtcctccccatgtgaagtcaaggcctcttctggctggctgtgtgttaggggaggcacctgcgcagcctctctttcttcgtttgtaagtactaatcatctttgcagggtaattgcaaagataaagtacaatgcacatgcaagttaccagaacgtccagcatgtggcagacactcaattacagtttacctccatgctcgtatttgagagtctaaaaccaacgaggtccagtgtctccagcatgcctgttgtggatgaaccaccatctctaaactcccacacttgcatctgtctcttcccattgtagcctgaccttggtgtctccctgtatctgaggttgtttctctgcacatttcatatgcaagggaccaaataacccgctgagcaacagcagactttgccgaaccctgtaggcatcctaagtccatcagagaagcattagtgatagattcccagaggtaaggatggaataagtgtgccaaagggaaggagcaaggaaaaaagtcctcggggccatggagtggtcaggaaagagcagcccgtggagtctcggagcagccttagaacatatactctgggcagagggcacagcacatggaggtccctaagtgaggaaagagcttggcacatttgatgactgaaaagaatgatcagcatgtccctcttgggacaggaaggaaggaaggcaggcaggccggccggctggccggcccttttagctgtgaggggtggccttgagtttagaatgccgtgggcctccctcccagtccgttgctggaagcaagttccacgaggctgactaggctttccttgtttaggacaggcgtccgagtctggcttcctcgccagcctcagagtggacaaggaaggtgtgagggagaggtttcagcactcactcctctttctgcttggccccatgctgcctttctccacccaccctgcagacctccgcccaggtgactcagggtagagttcttcaccctgagcctgtgtgtacagcgggcttgcccttcccttttgcaaaaggtttttcagagggaggacagtgtgtcctgggtcagccactctcaggcagtgcccaagtcttctaagttcttgtcctgtcagaaggatctggaacgagaagagtgtcagtgtgcattcatgttcttgctctaactgtggaccgtgggataatgagtagaaaatacacaacaggatgtaggcctagtaaaacctgattgttggctcagtggggcgggtaaaggtgcttgttgccaagcctgacagcctgtgcttgatcccttgaacccacatggtgggaagagagagctaactccttaaggttgtcctctgacctccacacgcatgtcatggtacatgtgccctcaccctttacatacgcagaaataaatgtaaacattgcagtctttggggatatataaaattgtccaaacaagcaaaccagacttcaggtgagcaagagtgtgctttccacccaccctgacccaggtggctggcctctcgtggctccatccttagacaagccctgcccacacctctaacaatgcctctatcggttctcagagctgccgtcctcatcaagcgtttcctgcctggcctggtttttgcttagtgagagtggatctttccacacattgggtgtaggcttcacactagagtgaaggcatgcaagccttataaggacatgcctctttaataaaggtaggggtgacagattccagacaaacacttgtcacctcccctattgataacagacgtaggcgccactagatagaggtgacctggcaggatgaggattagcagagtaggactcagtagctgaccttgtatgcgtgttctcgttccagtgcctcatggcgtgggagtccattattccactactgcaagagaagcaagagactaagtaggttttggaacagagactcttctgcctccacagggcatggaaccctgaaccagaatgtccctgcagtgccggagaggtcgccgtgggaaaacagcacaacagcacctcttgtgtgtgtactttctacccccgcccccagttgttttcagttagtatttattccttggagtctatgagactgtaatcatctctcagcagcatacctccgtattgtgaaggaacctcttaaatggaacactaaaagacttgaaactaaggggcaagataacccccacatgacacgtgacatcactttggggacagcccagttgccattgtgggacagaaccccagtcctgcgtttcagggacatggggagacatgaagaaggcagctgcagcttgctgtggagaccccgtggctctgcactttacccgtgagggcattaacctgacccagcatggaaggaggtgtgggtaccttctcagaaagtccttaatttacagtggcctgtagcctgtggccgtggccgtggctgtggcctgctgcctgctcatgatgagtggcctctgttgacttgtttctggttcacgtggggccacctgaatccgtgtctgtgagcattgacgcttgagtgagcacgccagcgtccttgtccttatgggatgcctcaggatcttgtttctgacaccagaatgcaacagatgagaagctttttggtgtgaactggaaaaaaaaaaaaaggtgcatttttctccgtgaaggtcttagtgtatgtgttttgcttgttaactgtcatcgtggttgggattagacctgtttggaaacagctgctgtcagtgatgctccggtgtgccaagccccagctccgatgtctgctttgtgcaatttgcctttacctcaccaaaaatgtctagtttaatcttcctgccgtgcccgctgactgtctgggcagccttgcagtgggggctgatgtgctgtcttatttttgctgtcacaatttgtaaactcagtgtgacttctatatgagtgttttaaccctcagcattctgtggtcaggaagataaaagcatctgcaggtccctccaagacgagaagagcaacatcatgctctttgcttctgtctatgtggaaatctccgtttgcagccaaaatctgggggctgccactgtacttaacatcttcatttgaagcctttcagatttccataaagccagcaatcagaaaggatctctcttccataccactgttcttgctaaaaggaagctgcatatttgtgttctttcatctgtggctctttgctaaaaatccgtagatctgagctgcaggtaaacggaaggggcgtcgttgtctttaaggtgaggcggccaagcactgctccgtatataagttaatttgtaaatccggagcagacggcatgctaagtcctgtaattccctctaacattgagtcagatacatcatgggacatcatgggatggcagctagatagcatgaaacaatttatcttctcatatttgacaaatttgtgatagaaataataattcccacatctaccggtacttgcctaaaccctgactgtgccatcccaaaggccttgatgtgaattttctttggtacaaataggaatggcccactgaggcagaggagtaagagtggtccatacacccaaatgccagcaaattggcatctcattctacctctaaaccactgggttggtatgggtatgaatgctcagagctcacccgagcatgctggtagagtcagggtgtgtatttagtcaccaaccggcctccattgtgtgtatcagcaaacaccagactcgctcagaggtgatgtccatctttgagaaacatgaagctttgctttgtggattgtatgcctgatatgatgaatagtcatgtgatgatacatgggaagaactatagaaagaattatccagaagctaagatttgatggccagctggttgccaaaacctcaagtcaatcctgtgtgctggttagttatgcaagaagaaagccccgtagaaacagcctccagctgcactgggagacgtagggagggaagcagggtccacagccattccctcatgagaggtggctctcatggcatcttgcaatgtttgtcttgttttgttcatttggccagtaaggaatgtccctgggctttgagtttccagaaagagatggaataatggagactttctttccctggggaccagtgtcagtggcagagccagggacacccatgcacaaggaggcatgcttgcccttctccttgggatggcagctggtgagctgaggaggctggcctagaggaaaaaaggcagcagacagtgaagaggccttcctccctccctgctccacaggccccctcagtccctgggaaagtatgcacaaaagagactccctacatagctcagagactacagtgccaaaatgccccagagaggctccattacttctggagcctacaaagctgttccctgatgtcacaggtccctccgactcattttccaggagactttgccttgagggtgccacaggtggagagataaagatagcttttgaagcttgaacacatgccagtgagatgaaagttggccttagcaactgcccaggtcctgagaaatggagggcttgttcacggggttagaaacctgcaaaggcagccgggcgtggtggcgcatgcctttaatcccagcactcgggaggcagaggcaagcggatttctgagtttgaggccaacctggtctacaaagtgagttccaggacagccagggctacacagagaaacttcgtctcgcaaaaccaaaaccaaaaccaccaccaacaacaaaaaacaaaagtccaaaaaaccaaaaaacctacaaaggcaaaagaggtttgagagccgtggttgtttaggacagttgtggtttgtagcaggaaaggacactcctgatgttgggaatttgcaagaagaatctgggctgagctgcttcaaacaaggaggctttgctctggagtgaggagggagtgacccctcagcctgtgtagggtccagttttatgctctcggaaggctcagcagtgattgctgccgagtgggaagtagcttctcccagctgttcctcacctcaccagatattttcccaaagccgaaacaagaaaagtcagcatgcctggggctagaagcggaatgtaagatacgtctctatgccaaatggagttgtagaatgtaccctctcagcccataaacaggaggaaaccatatgtgaacactacagcctctggcgagggctctgtggagattttaattttagaagggggcatgatggcagtgtttctcttttaggacaacacccacggaacactcaaaggctgtgtgacttgtcctgtcctgtggcaccgaagccctaggtagctggctgttttgatgaggtcatttgaatcatgggagtgtccttacactacactatcctgagctggttggggtgggtagaagaaggcaaggactgcctgagaggctgcgttgaccctactgatgtgggtcttgggatgggctggaacagggttcctgcctgagtaggtggaactggcaaccttgaagggtgattccccccccccccccgccacccccagaggatcagctgcctgtggttgggacagggcacaccaccttccctcagacggtcttgctaagtatatgactgggagagtttggtcatttttgtgtaccctatggtgggaatgtggggttgcctttcaaaagccttcaggatggcaacagattggatgtgctatctcagtgcctgcaggtctctctgctcgaggcagcagggggcgctttgcagtatagttgaggaaaatgaccgctccttgaccaaactgagatgcacttggtgtgtgggaactgattgcttcctccctgtttataattcagtgaataatcacgggcccaatattttactaacccactctgtaggttgtcagtgttccattttgaaagtgtccccgtggttgtacacttcagaggacagggactctgtgtgtctaagaaggctgggatgagggctctgttacagggcagactgttctctcatagtcttatctgtttgaatattcctgggtatgactttatgtgtggcaaaaacccacattaccaaagtagtttttaactactgtaatttgtaaataagtgttgtggcaggtgggaacctttaaaagatcagtaagatgtttctcatatttatgaacttagcacttgaaaaccaacacactcagaaaaagccacagattgttaaaagcctaattgtagttcgtaacaatttgtcagtacgtactaattgccttattcttcagctagtggtttataaagaggctgcatagaaagttttacacatggaagcagctgatgtagagacttcatataggcagctgcagtcctaaagtctcaagctagagggtgggggccacggaaggaaggcagcctttcaggtagcaagattaaatattgctgttgccaaatagtatttgaaataataccagaaaacggggaccacagtactgttcgatgttttcaagtgagaaagaggaatgtagtatgctttggcatagtttgggagtggagaatacagacattatcagcagtgacaaatcacatagcttcaaaaactcctccagtttgtgacaacatgacaggtgtgacagcatgacaggtttgctctgcttctgcagagtgggccccagaggtcacttaggactgagatgctccaaagtttgaagtgccaaataacatgaaacgtgctctgtcgactcaatattaaagccagggtgaagagttgcaaacccctctgtccctgcagtactgcctgagtgtgtggtgattctgggctctccacaaccagctcaaagcagctagcacccgtgctcactgttgttggacgggctggtccacagcctcagacccatgctctgccgagatactggacgggaggaaggatttttcctagactgcggattggcgtgacaaagcaatggctgtgtcagctgggccttcatccaggaacagaccaacataaaccagcatcttctaccagttagcactgtcctcctggaccatgctgagggttgggcctctccctcagagtcctttctcactgtagttctgtgtgcctgttcccttcatgcctgagtcaggaatacatggagagacagcctacatctgacagactcccacaaaacaaactgccagcaaactttctaactcattttaaccgttcaagcggggaattaaaacaaacttttggactatttttttttaattgttctttatgtttaaaacttgcagagatagaagcaggcttctgaggtacggggtcttgctgtgtgctctctctccgtgctgccgttaagccaaaacaaaagctgtgaacataggtgcttgagagaatgcgtgttgacaggaaagtgactgatttacagacccaagtctttgtctcatgaaactaccaaaaaagaatgtcaccttttttctttgttgtggaaccagagattataaaaaggaaaaaaaaggaaaaaaaaaaagttgtcttgttgtatttttgatgctggcacaaggttcttgtccactttggtttttcttatctctgtatgtaagaaattctgtttgttgtttactatggaattagtattacattttgaggtaaacaaagaatttgtattgcttgataaactattagcttgtaaattaaaatttttttctttacctcagttaacttaagtaatggaccaataaacctatcaaagctgcttcatttcttccggatcatgtgctcatttttgtctctgttaggactggaaaagcagggcatctgccttttgggctttttgaaagtttctctgaacacatggtaattttcttgtgagaatcaaaacacagagcaaccgtaaagacacacgcatgtacacacacaaactttgtattcactctgctataggtcctgacttagtttccttctcctgcatcttataagttggcaaatgaagaaactgctgtagtatcattgtgattgccaggtagatgatacacagagatttcctgcatggaaccatagccaaatgttatattctgggtcagggcagcacctcctgtttggttggttttttttttttttttttctttttctttcttttttttttttttttttttttttcctgttttcaagggttttccaagaaaaggaatgcctacagtttgtgagagcgttagcatttctaagtaagccaccagggctgagaaagaggctcagtgtaaagagctttcttgcactgttttctcagaggacacagtctgaattcagttcccagtccctgtgtcaggcaactcagaacactgtaactctagctccaggggatcccagaacctctgggccttctcatccacactcactcacatatatatgtagttaaaatgaagctggatgtagggtacacacttgttatcccagcacatgggagaaaggtaggcagatctctgagtttgaggccagtcttctcagcatattgagttccaggtcaaccaaggctacatcccctgtcttttccccatacactcaggaaagtattgactgaaagtgatcagttgtgtattccactaaggaagtctgctgggattgctgggaagtctgctggtgggttttgttttctattggtggtgggtgctgttcctgggtttgtttttgctgtttttgaggcaggattctgtgtattcctggctggtctcagaccggccatatagctaagaattgatctttccgcctctaccccccaagtgctgggattacgggtgtgtgcgaccatgcctggcttatgtggtgcggaagattaaacccagggcttcgtgcatgccaggcaagcactccaccaactgagctgcggccccagtcctgatctgtgcttttaaaagcaacaaaggcagcagatatcaccttgacttccagctgaggaatgctcagccaagaaaactcttttttttttcttttttttttctaaagagtttacattaatttaaaaactgttgtcatgcatacaactgtttttagttgtcagtttttacaaaatgtccatttcatgttcattccccttgggttggttaaatttaggctttagtcacagtcttccatagaactagcacgattccatgtgccccattggcgtcttttagacagcaatgagaaaagggggctggctagctggagcccgaagccctccaggatccagaacacctgtgcaagcagctggtacacacagacctcaacctcagcctggcagaggcatctgagaactaggaaatcttctccaacacccagaaagtgattttccctcccaccagggacctgcaggccaaagcaggttattggaagactggagcttgggtttcacaggcagaacctggttatggctggcgttttcagctcctctgtttctctgcacactctccttgttgtgacctcgggacttgtttgtaggccacaacactgtaagaaattgcagaagagagttgtaaaaggctggaatgaggcaaagcaggtgctcccccccctcctcctcacccatgcctgagtcatctcccacccctcttcctcaccaatggagtcactgatgtttgactccatagtgcatcagggtgctactgagtgagaggcttggctctagaggactctccggatgccttccagtcccatgataatgaacttctccctgtctctagtgacatagtgaactagacagctgccccattgtcctagcaactctgcctcgcactcctgcctagtgatgacttcttgtgaatatctcaacagcaagttagcctttactgatgccagagcggcctcgactgcagttagcagttacctctgaggaccttcttgcctacaccccgtccccagcactggggttgcacttgcttttcctgaggtgctgaagacctgactcgtatcatctcgcttacacagcaagcatttaccaactcgtcttcatggtcccaaatcattctccttattgtttagacaggcctcaggaagcctaggctgaggctagcctggaactcctgatcctcctgccttcaccctctgagagctggggtgacagagaaggcccagcatgtctggtttatggtgtgctgggaattgaactcagagcttcatgcttgctaggtgagtgttctaacaactgagctatagtgccagtctcaggtgccacgcctttttgacaaagcatttattcattaaacaaatctttctagaatagttcttaggtgctgggctctcgttgaacacagtggacacatgggagccacacagctgtggcctctgtcctcggcaagcctacaatctagcgggaagcatattaaacattaacacggtggtcaccagctagtgtgctctgaaggaaaactacaggagcttaagcaggactcagattagagcaaggtaaaaggaggagctttgttttctcatctgtaaagtggggataaataatagtcacttcgatggaatccttatgaatcatcatatataaaatatctaacacttttgttagtaccattttttttttaaagtctaggatggagatgggatagggattcacctaagtgtgcaggttggagaagatgaagtcattctcttttggtcgattatattttctctgtgcaatacagagcatccatgagtacctgtgtgcttgtgtgtgtgtgtgcgtggtgtatggggtggggtggggaaacaggctgtggcagcagcagagcctcacaaatacttccttagcatctcccttttcacgtaaagaagagcaggaagggaagacaggactcccacagtgactgtgacaatgcctgccttttgttatagggactaggcggggccagcatgcacacactcgaaaacacacacacacacacacacacacacacacacacacacacacacacacaccatttatggacagccctggcctcaggacctttgctggcatcaaggagaatgcagacgacaactggtccagccttctgactttcttggccgcctctgctttgccccacctccctgggactctctgtgattggaatgtagcttttccctctgtgaccaaaaaccacacaggtctttcctgttgcttttacttaatgactgatgacacagcttggcaacctccagctggaagagattttcagattcttattgagcgaccttggggaaggggaaggtcatagaaacactgctgccacgccatccgtgttcaatcttccttgtacattcaaatgacctgcggagctttaaagtaatgtctagcccagatcagttgagtcctagtctgtgagacctgagagcagtcattctgaaatcttccctgtccatgcaatgtatagagaatgtgtttgtctgcacatgtctctctgctgcagaagggagggggcggaaacacatagcaggtaggtgcctgagccacaggagcatcagctgctcactcggatgtttccagagcctcttcctgcttctgggacaaaaaaaatcatgaaggccctgtgtggccagttgagatttggtgtagggctggtaagatggttctacaggcaaggaagcttccagagcgcctgagtgtgattcccagcatccatgtcagaggctgacaaccacctataactccagttccgagggacccaacacctctggcctccaagggcactcagacacacatggcctctctctctctctctctctctctctctctctctctctctctcacacacacacacacacacaataagtaaataaatgcaccaagcctgatgacctgaattaagtttcagagcctacatggtatcatggtataaggagaggttgaactcccgcacacacatacatgcacacacacacacgcacacacacacagagtaaatgtaaaaaaaaaaaaattaaaaggaactggtgcagaagaaaatggctggatccaagtgcattgggtgaagggtcagggctgttccatgctctctcaaccctgttattgaagaaggcaagccagcctgcttagcacaacccatgtgaaactgggaaggatccagtcattgcatttgttggtctgtttataacctgatgacctacattggctagttagacttgtttcctactattgtttctgggtgtttatttgggttagaaaggctgtgtcaaccttcagtgaaatgggattggctacttggatgaaattattaatccattgcaaagctgaccagggaattggaactcctcaaaaatctatactgtatgctagctagctctcaccaaattagtccaacccatgcagccacgatccaatggaaaggtctaaaggatggacagtcctggacagtcctggacagtcctggctcagtcccctcatcttaagacatgagacttggccatggtcctctgcttggctaaatatccccacctgtttgctttttgtgtcttatttttctcacctaacaaagcgaacagccttaccaactgatggctcctatcactggaggcctggcagagaactagatattatgatatagtgtgaggattcaaaaaaatggctttggcctggagagatggctcagtggttaagagcactgacctctcttctgagaggtcctgagttcaattcctagcaaccacatggtggcccacaaccatctataatgggatctgaagtcctattctggtgtgtctgaagacagctacagtgtatccatatgaataaaataaagaaagaaagaaagaaagaaagtctttaaaaaaacccagcttcatcaagtctgccttcaactatttattatctactctgctgtcaacaatcagccattcctaatactaataaatataatactaatgctgatatctaatactaatatgggaacctcaaagagtgagactgtgtcaaatccattgtaccctagggcatattctgtggctgtcctgaaagatacatttctcttattgctagcccccactggtacatgagagagcttcaattcagggcagtggtatttacatgtagataccaaacacttaaaatgtgcctacaaaatggaatttacacacataacattatataactggatctcaaagatttggtcattttaaaaagtaaagcattcttgggtggagagatggctcagtggttaagagcactgactgctcttccagaggtcctgagttcaattcccagcaaccacatggtggctcacaaccatctgtaatggggcatctgatgccctcttctggtgtgtctgaagacagcgatagtgtactcacatacacgaaataactcacatacatgaaataaataaatcttttttaaaaagagagtaaagcatttctattgcctgattgtgtgtgctgggtagttacgtgctggaatatttgtgtaccagctatattaagctatattattataattagtttcaccatctttttttttctttttgaagacaggatcccatacgatctaggcataactcaaactcattgtgtggctcaggatggcgttgaacttttgatccccctgcctccacctcctgagtcc

SEQ ID NO: 851 - DNA, 3498 bp, Mus musculus
gtgggcggcgtggcgctgctagcagggcgcagggtcggaggtgctggggtttggcgcggcttagcccacggagctgtggtgtaacgctcgggaaagctcagcctcgcgggcaggagaagcatcgggcggaggctgccaccaccagctagtgcagggcctcgggccgagtggggcggagagctgcgggagtaagcggcggcccgggtcccgagcgctgcgcgccatggcgggcgggccccccaaggccctgccgtccacggggccccagtccttgcgcgacatgccgcacccgctagccggctccagcagcgaggaggccgtgggaggcgacagcacgcccagcccggacctactgatggcccgcagcttcggtgacaagctggcagaggttgaggagaagatagaccagttacatcaagaacaagcttttgctgacttttacatgttctcagaacttcttactgactacattcgtctcattgctgcagtgaaaggtgtgtttgaccatcggatgaagtgctggcagaaatgggaagatgctcaaattaccttgctcaaaaaacgtgaaactgaggcaaaaatgatggttgctaacaaaccagataaaattcaacaagctaaaaacgagataagagagtgggaggcgaaagtacaacaaggagagagagattttgagcagatctctaaaacaattcgaaaagaagtgggaagatttgagaaagaacgagtgaaagattttaaagctgatatcatcaagtacttggaatcattagatctcatcttgcccaacggtggtactccagcaggcactgccagcccagcttcttcatcttcccttctgaacagacttcagcttgatgatgacattgatggtgaagccagagatctctttgtcacagttgatgatcctaagaagcacgtctgcacaatggagacctacatcacatacaggatcaccaccaaaagcacacgggtggagtttgacttgccagaatattctgttcgtcggcgataccaggatttcgactggctgaggaacaaactggaagagtcgcagcccactcatctcattcccccgcttcctgagaagtttgtggtgaagggtgttgtggatcgcttctcagaagagtttgtggagaccagaagaaaagcgctggacaaattcctaaaaaggattacagatcaccccgtgctctctttcaatgaacacttcaatgtgttcctcactgctaaggacctgaatgcctacaagaagcaagggatagcattgctgagcagagtgggtgagtcagtcaagcacgtcaccggaggctataagctgaggagtcggcctctggagtttgcggccatcagcgactacttagacacttttgcactcaaactgggaaccattgatcggatagcccagcggatcatcaaggaagaaatagagtacctggtagagctgagggagtacgggcctgtgtattccacctggagcgccttggaaggcgagctggccgagcccctggagggagtgtcagcctgcattgggaactgctccacagccttggaagagctgacagatgacataacagaagagtttctgccagtgctcagggaatacgttctgtactctgactccatgaagggtgtattgaagaagagggaccaagttcaagcagagtacgaagccaaactggaagctgtggctctgaggaaggaagagcgtcccaaggtgccagcagatgtggagaagtgccaggataggatggagtgcttcaacgctgacctgaaggctgatatggagaggtggcagagcaacaagcggcacgacttccggcagctgctcgtgggcttggctgacaagaatatccagtattatgagaagtgcctcatggcgtgggagtccattattccactactgcaagagaagcaagagactaagtaggttttggaacagagactcttctgcctccacagggcatggaaccctgaaccagaatgtccctgcagtgccggagaggtcgccgtgggaaaacagcacaacagcacctcttgtgtgtgtactttctacccccgcccccagttgttttcagttagtatttattccttggagtctatgagactgtaatcatctctcagcagcatacctccgtattgtgaaggaacctcttaaatggaacactaaaagacttgaaactaaggggcaagataacccccacatgacacgtgacatcactttggggacagcccagttgccattgtgggacagaaccccagtcctgcgtttcagggacatggggagacatgaagaaggcagctgcagcttgctgtggagaccccgtggctctgcactttacccgtgagggcattaacctgacccagcatggaaggaggtgtgggtaccttctcagaaagtccttaatttacagtggcctgtagcctgtggccgtggccgtggctgtggcctgctgcctgctcatgatgagtggcctctgttgacttgtttctggttcacgtggggccacctgaatccgtgtctgtgagcattgacgcttgagtgagcacgccagcgtccttgtccttatgggatgcctcaggatcttgtttctgacaccagaatgcaacagatgagaagctttttggtgtgaactggaaaaaaaaaaaaaggtgcatttttctccgtgaaggtcttagtgtatgtgttttgcttgttaactgtcatcgtggttgggattagacctgtttggaaacagctgctgtcagtgatgctccggtgtgccaagccccagctccgatgtctgctttgtgcaatttgcctttacctcaccaaaaatgtctagtttaatcttcctgccgtgcccgctgactgtctgggcagccttgcagtgggggctgatgtgctgtcttatttttgctgtcacaatttgtaaactcagtgtgacttctatatgagtgttttaaccctcagcattctgtggtcaggaagataaaagcatctgcaggtccctccaagacgagaagagcaacatcatgctctttgcttctgtctatgtggaaatctccgtttgcagccaaaatctgggggctgccactgtacttaacatcttcatttgaagcctttcagatttccataaagccagcaatcagaaaggatctctcttccataccactgttcttgctaaaaggaagctgcatatttgtgttctttcatctgtggctctttgctaaaaatccgtagatctgagctgcaggtaaacggaaggggcgtcgttgtctttaaggtgaggcggccaagcactgctccgtatataagttaatttgtaaatccggagcagacggcatgctaagtcctgtaattccctctaacattgagtcagatacatcatgggacatcatgggatggcagctagatagcatgaaacaatttatcttctcatatttgacaaatttgtgatagaaataataattcccacatctaccggtacttgcctaaaccctgactgtgccatccca

SEQ ID NO: 852 - protein, 611 aa, Mus musculus
PTELWCNARESSASRAGEASGGGCHHQLVQGLGPSGAESCGSKRRPGSRALRAMAGGPPKALPSTGPQSLRDMPHPLAGSSSEEAVGGDSTPSPDLLMARSFGDKLAEVEEKIDQLHQEQAFADFYMFSELLTDYIRLIAAVKGVFDHRMKCWQKWEDAQITLLKKRETEAKMMVANKPDKIQQAKNEIREWEAKVQQGERDFEQISKTIRKEVGRFEKERVKDFKADIIKYLESLDLILPNGGTPAGTDASSSSLLNRLQLDDDIDGEARDLFVTVDDPKKHVCTMYIYITTKSTRVEFDLPEYSVRRRYQDFDWLRNKLEESQPTHLIPPLPEKFVVKGVVDRFSEEFVETRRKALDKFLKRITDHPVLSFNEHFNVFLTAKDLNAYKKQGIALLSRVGESVKHVTGGYKLRSRPLEFAAISDYLDTFALKLGTIDRIAQRIIKEEIEYLVELREYGPVYSTWSALEGELAEPLEGVSACIGNCSTALEELTDDITEEFLPVLREYVKDSMKGVLKKRDQVQAEYEAKLEAVRKEERPKVPADVEKCQDRMECFNADLKADMERWQSNKRHDFRQLLVGLADKNIQYYEKCLMAWESIIPLLQEKQETK

SEQ ID NO: 853 - DNA, 81656 bp, Homo sapiens
  misc_feature (1)...(81656): n = A,T,C or G
gacctcccaaagtgctgggattacaggtgtgagccactgcgcgtggccaacacattctttaagcatctgctgtgtacctggcacgaggggggtaaattaagaaaagtaatatgcagtctgtgtattcagagagccatcattttacccttaacgtaaagatgccttgagaggctttgtcaggctcctctgagactagatcattcacttgcccatattcctccaatagaatcaaaaagagaaattagattgttttagcataacttatttttattaaaactatattggctcctagtctataccactctcttcataaatcatatgtttaatgtaatataaaattttgccagtgatttatgttaatttaatattctgtcttgtggctggctgaccataatggtgtatcttaaaattgaaattctttgaaccagaggagtttgtaaagcaacctcactctgcatctgtcttcctagggtaaagtaaaagtgggaaggagtaagaaatgctcttataatggaaacctacatggtgaaaattggtattttgcaacaatggggagttttcattattaatcaactatgtagttgtaactcttcacaaaggctattctggatatcctttgttataataaaatcattaagaaaatatatttgaggccccaactgtgggtctcaatgcaatttttattttttagcaattattgtgtgtctgctatgaacccagcctcatagtttataagaggatgcaagaatacttacaagcacgtgtgtgtgtgtctgtgtgtgtgtgtatgagagagagagaataggtgatacagcaccagccatgtaccacacactattgcaactgcttccatatactaactaactcaatcccactatacccattttataaatgaggacatcggggcttagattaagaagcttgcttaagttgcactggtagtaattagtggtactgggattcagaactgggcagtctggctcaggttagcctcagttgcttgtccttccacagacatttattgagtacttttgataggcaagggattgaatttggtcgtttctaagattcattcattcatgaaatactgagtacctaccatgggccagggtagcataggagggaagaatctggagtatgtggcaaggtctgattgactgactctcccctccctcactcccaacaactgattcgagaactaacttcatactgtctggccaagacatttcagatctttatgtgggctgttcctggaaggttattggctgaggttcccagggcaaatgttaggggagttggcttgaagtcactacccgacctggggagacagaaagataatcacacacacacactcacagtacagtctcacacacacacacacacacacacacacacacgcacacatgatgagcaaggcacagttgcagtcactggggacttacagtgtttgtggataagtttgatatataaataaatgattaaaactacaaaatgcttcagtggaggtgtcttcaaagtattgagaagggtgtgagtaattctaccagggagtgggtcaaggaaagcattaaaggagaggggattcaagcagattcctggaagatatttggagattattatgtacagcaggggagcttttccagcaaagataaggggcatgaaactgctgggtggttcctgagaactggtccctcggatgtggaaggaggtggtaagaaaggaggctgctgagatcaaaccaggccagattgtgggaaaccactgtctgagctgattttggcatctctgccttaagattgtgaattctttttcttttgtgcagtgtctgtccactgacagagctgttcggaggcccggtgtgctagtgttgataaaatgttaagggagggcccctgtgatgcctagcatggcatcctgcctgaggtcagtgtttaaatgtttactgaaataaccaagacatgatgtttatcctggagttccagagaagatgttgtccccctacaaatccccagacactggggtgtggacgccgtgtgtcccgtggtaccagtacattgaaaaggcagtcccatcagtggctgctgctgtagttggactctgcagtcacgtccacactgagaggggctgttgaaggtatgacgtcccagctgatgagcttgtccatctgccctgtagtcagaagcataacggaagagaaacggaggggggaggtctattgccatgagtaccttctgtgaaaaatggtacccttttagtaattacagtttttttgatattgcgtaggtatgtgattaaatgatctgtggtcagcagaaatgggagttgaaggtgctttttctgtgtactttccattaccccccaagttgggtgacattgcccttgaccccaggccacacttcttcactccgccgtgtcccattgcccttcccagatgtcccgtcatcagctagagctcatggatgtgactgctaggttaacctctaatttcctgtacgttctcttgcatgggggctaggtcataactcacctgcaaaactccaagaggagagaatatagggaaagcaccccctcctccccagcctgtgatctgatggcccacaggtcacccaggctcttcccatggtgtcatgtcactttcttgccatattctttagtctctgtctcccagttattccaaagcgatattcagaggccttcacatctgctgctaggcagggctctgttctgttaccaaacctccaaaccaaacaagataactaactaggccttcttagtttcacagccattttttgaatactgtagggacataatttattcattggcttcttaccaagaccaaagagcgaggtctgcaatttaaaaaatctatctttcccttcctttcctggcatttgtcccactgactaccctcctacccactactctcttttaaaaacgtcatagaaaattttaagcatatagaaaagggaagagaattgtataatgaacctgcaggtaccagcttcaatggtgatcagcttgggcatcttgtatcatttatatccccacctactcatccttaattattttgaagcaaatgccattttattttattcataaatattttagtatataattttaaaagatgaagattttgtaaaatcatacttccattatcatacccagtgattccttaatatcaatattcaaatttccctaaatatctcaaaatctttatctttttgtatcttgttttaatggaattggttgatctcttaagtttctttacatttataggtgcttgcgctctctcttcttttctttttctttttctttttttttttttttttgagatggagtcttgctctgtcgcccagactggagtgcagtggcatgatcccggctcactgcaacctctgcctgccggggttcaagcaattctcctgcctcagccccccgagtaggcgcacgccaccatgcccagctaatattggtatttttttttttttttttttttagtagagacgatttcaccatgttggccaggctggtcttgaactcctgacctcaagtgatctgcctgccttcgcctcccaaagtgctgtaattacaggcgtgaggcactgcgcgcccagccaggtttcttaatgtttacctgggcccacgtggtggtcttgacaaagtgggaaaaacggagtatgctcacagggagctttccttgttgaggtttgtttttttttttttcttttttttttttttttttaattatactctaagttttagggtacatgtgcacattgtgcaggttagttacatatgtatacatgtgccatgctggtgcactgcacccactaatgtgtcatctagcattaggtatatctcccaatgctatccctcccccctcccccgaccccaccacagtccccagagtgtgatattccccttcctgtgtccatgtgatctcattgttcaattcccacctatgagtgagaatatgcggtgtttggttttttgttcttgcgatagtttactgagaatgatggtttccaatttcatccatgtccctacaaaggatatgaactcatcattttttatggctgcatagtattccatggtgtatatgtgccacattttcttaatccagtctatcattgttggacatttgggttggttccaagtctttgctattgtgaatagtgccgcaataaacatacgtgtgcatgtgtctttatagcagcatgatttatactcctttgggtatatacccagtaatgggatggctgggtcaaatggtatttctagttctagatccctgaggaatcgccacactgacttccacaatggttgaactagtttacagtcccaccaacagtgtaaaagtgttcctatttctccacatcctctccagcacctgttgtttcctgactttttaatgattgccattctaactggtgtgagatgatatctcatagtggttttgatttgcatttctctgatggccagtgatgatgagcatttcttcatgtgttttttgactgcataaatgtcttcttttgagaagtgtctgttcatgtccttcgcccactttttgatggggttgtttgtttttttcttgtaaatttgtttgagttcattgtagattctggatattagccctttgtcagatgagtaggttgcgaaaattttctcccattctgtaggttgcctgttcactctgatggtagtttcttttgctgtgcagaagctctttagtttaattagatcccatttgtcaattttgtcttttgttgccattgcttttggtgttttggacatgaagtccttgcccacgcctatgtcctgaatggtaatgcctaggttttcttctagggtttttatggttttaggtttaacgtttaaatctttaatccatcttgaattgatttttgtataaggtgtaaggaagggatccagtttcagctttctacatatggctagccagttttcccagcaccatttattaaatagggaatcctttccccattgcttgtttttctcaggtttgtcaaagatcagatagttgtagatatgcggcattatttctgagggctctgttctgttccattgatctatatctctgttttggtaccagtaccatgctgttttggttactgtagccttgtagtatagtttgaagtcaggtagtgtgatgcctccagctttgttcttttggcttaggattgacttggcgatgcgggctcttttttggttccatatgaactttaaagtagttttttccaattctgtgaagaaagtcattggtagcttgatggggatggcattgaatctgtaaattaccttgggcagtatggccattttcacgatattgattcttcctacccatgagcatggaatgttcttccatttgtttgtctcctcttttatttccttgagcagtggtttgtagttctccttgaagaggtccttcacatcccttgtaagttggattcctaggtattttattctctttgaagcaattgtgaatgggagttcacccatgatttggctctctgtttgtctgttgttggtgtataagaatgcttgtgatttttgtacattgattttgtatcctgagactttgctgaagttgcttatcagcttaaggagattttgggctgagacgatggggttttctagataaacaatcatgtcgtctgcaaacagggacaatttgacttcctcttttcctaattgaataccctttatttccttctcctgcctgattgccctggccagaacttccaacactatgttgaataggagcggtgagagagggcatccctgtcttgtgccggttttcaaagggaatgcttccagtttttgcccattcagtatgatattggctgtgggtttgtcatagatagctcttattattttgaaatacgtcccatcaatacctaatttattgagagtttttagcatgaagggttgttgaattttgtcaaaggctttttctgcatctattgagataatcatgtggtttttgtctttggctctgtttatatgctggattacatttattgatttgcgtatattgaaccagccttgcatcccagggatgaagcccacttgatcatggtggataagctttttgatgtgctgctggattcggtttgccagtattttattgaggatttttgcatcaatgttcatcaaggatattggtctaaaattctcttttttggttgtgtctctgcccggctttggtatcagaatgatgctggcctcataaaatgagttagggaggattccctctttttctattgattggaatagtttcagaaggaatggtaccagttcctccatgtacctctggtagaattcgnnnnnnnnnnnnnnnnnnnnnnnnnnnnnnnnnnnnnnnnnnnnnnnnnnnnnnnnnnnnnnnnnnnnnnnnnnnnnnnnnnnnnnnnnnnnnnnnnnnnnnnnnnnnnnnnnnnnnnnnnnnnnnnnnnnnnnnnnnnnnnnnnnnnnnnnnnnnnnnnnnnnnnnnnnnnnnnnnnnnnnnnnnnnnnnnnnnnnnnnnnnnnnnnnnnnnnnnnnnnnnnnnnnnnnnnnnnnnnnnnnnnnnnnnnnnnnnnnnnnnnnnnnnnnnnnnnnnnnnnnnnnnnnnnnnnnnnnnnnnnnnnnnnnnnnnnnnnnnnnnnnnnnnnnnnnnnnnnnnnnnnnnnnnnnnnnnnnnnnnnnnnnnnnnnnnnnnnnnnnnnnnnnnnnnnnnnnnnnnnnnnnnnnnnnnnnnnnnnnnnnnnnnnnnnnnnnnnnnnnnnnnnnnnnnnnnnnnnnnnnnnnnnnnnnnnnnnnnnnnnnnnnnnnnnnnnnnnnnnnnnnnnnnnnnnnnnnnnnnnnnnnnnnnnnnnnnnnnnnnnnnnnnnnnnnnnnnnnnnnnnnnnnnnnnnnnnnnnnnnnnnnnnnnnnnnnnnnnnnnnnnnnnnnnnnnnnnnnnnnnnnnnnnnnnnnnnnnnnnnnnnnnnnnnnnnnnnnnnnnnnnnnnnnnnnnnnnnnnnnnnnnnnnnnnnnnnnnnnnnnnnnnnnnnnnnnnnnnnnnnnnnnnnnnnnnnnnnnnnnnnnnnnnnnnnnnnnnnnnnnnnnnnnnnnnnnnnnnnnnnnnnnnnnnnnnnnnnnnnnnnnnnnnnnnnnnnnnnnnnnnnnnnnnnnnnnnnnnnnnnnnnnnnnnnnnnnnnnnnnnnnnnnnnnnnnnnnnnnnnnnnnnnnnnnnnnnnnnnnnnnnnnnnnnnnnnnnnnnnnnnnnnnnnnnnnnnnnnnnnnnnnnnnnnnnnnnnnnnnnnnnnnnnnnnnnnnnnnnnnnnnnnnnnnnnnnnnnnnnnnnnnnnnnnnnnnnnnnnnnnnnnnnnnnnnnnnnnnnnnnnnnnnnnnnnnnnnnnnnnnnnnnnnnnnnnnnnnnnnnnnnnnnnnnnnnnnnnnnnnnnnnnnnnnnnnnnnnnnnnnnnnnnnnnnnnnnnnnnnnnnnnnnnnnnnnnnnnnnnnnnnnnnnnnnnnnnnnnnnnnnnnnnnnnnnnnnnnnnnnnnnnnnnnnnnnnnnnnnnnnnnnnnnnnnnnnnnnnnnnnnnnnnnnnnnnnnnnnnnnnnnnnnnnnnnnnnnnnnnnnnnnnnnnnnnnnnnnnnnnnnnnnnnnnnnnnnnnnnnnnnnnnnnnnnnnnnnnnnnnnnnnnnnnnnnnnnnnnnnnnnnnnnnnnnnnnnnnnnnnnnnnnnnnnnnnnnnnnnnnnnnnnnnnnnnnnnnnnnnnnnnnnnnnnnnnnnnnnnnnnnnnnnnnnnnnnnnnnnnnnnnnnnnnnnnnnnnnnnnnnnnnnnnnnnnnnnnnnnnnnnnnnnnnnnnnnnnnnnnnnnnnnnnnnnnnnnnnnnnnnnnnnnnnnnnnnnnnnnnnnnnnnnnnnnnnnnnnnnnnnnnnnnnnnnnnnnnnnnnnnnnnnnnnnnnnnnnnnnnnnnnnnnnnnnnnnnnnnnnnnnnnnnnnnnnnnnnnnnnnnnnnnnnnnnnnnnnnnnnnnnnnnnnnnnnnnnnnnnnnnnnnnnnnnnnnnnnnnnnnnnnnnnnnnnnnnnnnnnnnnnnnnnnnnnnnnnnnnnnnnnnnnnnnnnnnnnnnnnnnnnnnnnnnnnnnnnnnnnnnnnnnnnnnnnnnnnnnnnnnnnnnnnnnnnnnnnnnnnnnnnnnnnnnnnnnnnnnnnnnnnnnnnnnnnnnnnnnnnnnnnnnnnnnnnnnnnnnnnnnnnnnnnnnnnnnnnnnnnnnnnnnnnnnnnnnnnnnnnnnnnnnnnnnnnnnnnnnnnnnnnnnnnnnnnnnnnnnnnnnnnnnnnnnnnnnnnnnnnnnnnnnnnnnnnnnnnnnnnnnnnnnnnnnnnnnnnnnnnnnnnnnnnnnnnnnnnnnnnnnnnnnnnnnnnnnnnnnnnnnnnnnnnnnnnnnnnnnnnnnnnnnnnnnnnnnnnnnnnnnnnnnnnnnnnnnnnnnnnnnnnnnnnnnnnnnnnnnnnnnnnnnnnnnnnnnnnnnnnnnnnnnnnnnnnnnnnnnnnnnnnnnnnnnnnnnnnnnnnnnnnnnnnnnnnnnnnnnnnnnnnaccctcagctgcaggtctgttggaataccctgccgtgtgaggtgtcagtgtgcccctgctggggggtgcctcccagttaggctgctcgggggtcaggagtcagggacccacttgaggaggcagtctgcccgttctcagatctccagctgcgtgctgggagaaccactgctctcttcaaagctgtcagacagggacacttaagtctgcagaggttactgctgtctttttgtttgtctgtgccctgcccccagaggtggagcctacagaggcaggcaggcctccttgagctgtggtgggctccacccagttcgagcttcctggctgctttgtttacctaagcaagcctgggcaatggcgggcgcccctcccccagcctcgttgccgccttgcagtttgatctcagactgctgtgctagcaatcagcgagattccgtgggcgtaggaccctccgagccaggtgtgggatatagtctcgtggtgcgccgtttcttaagccggtctgaaaagcgcaatattcgggtgggagtgacccgattttccaggtgcatccgtcacccctttctttgactcggaaagggaactccctgaccccttgcgcttcccaggtgaggcaatgcctcgccctgcttcggctcgcgcacggtgcgcacacacactggcctgcgcccactgtctggcactccctagtgagatgaacccggtacctcagatggaaatgcagaaatcaccgtcttctgcgtcgctcacgctgggagctgtagaccggagctgttcctattcggccatcttggctcctccgcagaggtttgttttttttttttaaatggagtttcgctcttgttgcccaggttggagtgcaatggcgcagtctcggctcactgcaacctccgcctcccaggttcaagcaattctcctgcctcagcttcccgagtagctgggatcacaggcatgcgccaccacgtccagctaatttttgtatatttagtggagacggggtttcaccatgttggccaggctggtctcaaactcgtgacctcaggtgagccacccgtctcggcctcccaaagtgctgggattacaggcgtgagccactgcgcccagccccttgttgaggtttgatgatggtggggccattatgttctctgcccttgaactgcttacttatattggtttctccagcacttcctaaaagatgaattggcatgaaattgattcaaagcactaccatagtttgtttctcttggtcgtaaaagatttgttcactcaagaaacactgagtagggagaggctcaggtgtttcgaaagttatttttgggttttagaaatgtttattggtttggctaaaccagctgcttttgctgatactctccagtatgtgttttcatttaattttaaggtgctcttttcttcttttaggatctcattttgcccaacggtggtactccagcaggtacttcaagtccagcttcttcatcttcccttctcaacagacttcagcttgatgatgatattgatggtgagactagagatctcttcgttatagtcgatgatcccaagaagcatgtgtgtacaatggagacttacatcacctataggatcaccaccaaagtaggtccctgtgttatagaatgcccgtgttgagtggtctcggggaattggggtctacctcagtgaattttgcctttgctctcccccttattgtacaactctgttcaccttgattgcaattgtgagtgtggcttcttgagagaatagatgtaattcagatgaaaaggattatatataatagttttttaaatcttagaatgaggaagaaattgtaagatttttcaaataaacatttaatccctatacttgcgcttatttttttttaccatgatactatttaacatgttaatatcatattgcttctgaaatttatgaatcattgtatcaacctaaatcactgtgatgagaccatgaataaaatttggcctaggtggggttgatggtagcaggaggaggaataatgggaggatagaaactaatactgtctttctggtatgtgtcagataggtagtgggcaggtgttgagatttaattgattaattaaataacttttaagatcataacaattttttattttgagacagagtcttgctctgttgcccaggctggagtgcagtggtgtgatctcagcccactgcaacttccacctcccgggttcaagcaattctcttgcctcagcctcctgagtagctgagattataggcatgtgccactatgcccagctaatttttgtatttttagtagagacagggtttcaccttattggccaggctggtctcgaactcctgacctcagatgatccacccgcctcggcctcccaaagtgctgggattacaggcatgagccaccacgcccagccaagatcataacaatcttaaaacttatatcctttagttacaatttttcagatgaagaaatagaggtggaaagttcaaataactcgctcaaagttacaaagttggtaaccaggattctaatttgaatttgtaggactatacagcctatattttaatttttaaaaaccatactctttacataattccacttataaaagaataattttaatgtatcatttgttacttatgaaaattattttttgaatatttaaaatagtattaaagttttagtcttggaacaaggtttcccaatcttggcagtattaaccttttggactgaagagttctttgctgtggggggctgtcttatagagtgtttatcagcagccctgtcctctacccatgagacggcaggagtgttctcttggtccccagttgtgacaaccaaaaatgtctccagacattgccaaatgttccctgggggacaggattgccaccccacccccgaccagttgaaagccacatatttagaggaagaatgacaatattgacattattagggagagaattcacattatcactttgtatcttgggataaaaaagtgtttagttaggaagctatcctatttcttggtaccccacccccaccaagtcacataacaaagaatgatttacagatatttttggaacctttaatagatggtgtctttatggaaggcattaagagaagctctgatgagcgtgtccctcgtcttttactgtgtcttttttctttttcattgtagaaaaaaatcattttttattttgaaagttttgtaagttctgtaccttttaaaattctttggaaagacaagcagggaataaaatactcaagttgtgtttcttcatctcttattggatgaaaattttatatttgtaaaaaaataaaagaagcgatgctgaaggccacatgctgagtggaaacagggagcctccctcagcccttcttacttaccttgtccttcttgccaaaagcaaccatggctaaaatttgctgtgtgtccttctagttgtttttctttgcgtttacattcacacacatgtatagttagaatgtatatgatttagatttcagtgtaatgttgctttccaatgttcccttccattttatagtatttttgaagacctttccatgttcatatgaccatgtctagcttactctttcaatctctgtctaattatttatgcaataattatatcttttctctatggacatttaagcctgctccagttttttgatgttactactctgtcttttcttttctatcttttttttttttttttttttttttgagacagagtctccctctgtcgcccaggatggagtgtagtggcgtgatctcagctcactgcaacctccgccctctgggttcaaggggattctcctgcctcagcctcccgagtagctgggactacagatgtatgccaccacgcccggctactttttgtatttttagtagagatgaggttttactatgttggccagcctggtcttgaactcctggtgtcaggtgatctgcccgcctgggcctcccaaagtgctgggattacaagcgtgagccgctgtgtccggctgctaccctgtgttttctgcagcaggttcgcatgtaaagatatgtctatgtaagtacgtgtgcacatgcatagtcttaccccactacaccactgggcacctagcccagacattgggctagatgcttacatatattatttcctcagaggacctagattaatatacatatttccaggaattatatccatttatttatttttttctagggtgaccttattttttaccctgtagtcagtgaaaggtaagcctgtttttcttgacttagtgctgtaaacagccaaatgacaaagtgaccgccttgctggcacagcagtgcttgcccactgtgacatttcccctcagcttcttgatttttctgccccaaaatgcaaatactacaggactcccattaactgattgagaggctaacgcgcaactgcaactcaccagtctttcctgtgctgcttctctttccttccctacctttttccttctgtgttcttatttctatcccttctcttgggcttgatttcctataagtcattaaatgccttagagtaacgttttccaagttctagcagcacattttcacttggctgtgatgccagcacctcaagataatcttgttgcagaactgagttttactttttatcatttctttcacttctgatcccaaaccagagttgtcttcttttcctgtttctaatagtgacaccaggtttatattttggtggtgcattcagaggcttctttctgaagttgtattgacggatatcgtaggggtgtgtgagaatgagagaaagagaacaaacaagaggaacacgggatcccaacacctgaccctgtcctgggacttccacttctgcagaggtcctcaaacgaagttaatggtcagaggacaaggttgttcaaatgctttgctttattaccttaaggctttgatgctctagtcctaattcagattcctgatgaccagggctggacaaagtacagagctctttttgcctgagctaaaataagtgaaggctgacagccaatgtaggcaaagaattatccacccaaatctaaggtaaaagtatcttctctccccagtggtggagagccagtttaggccttcttagggcaggcagcttctggctctttttttctggagactacaagaaagtaacatcataacagcagctagttattggacacttaccatgcactgtacttttttgcagttgaaacccttttatttttatgttatataagtaatgtatgttcattgtagaaaaaaaagaaagttcaagtaagctaaaacactaaagaatgcctatacgctcaccagccagaaataattgttgctgactttctatactacttcatccagttacaaaaacgagtattttgtatactgccaattcacttaatacattgtgaacatgtttctatgctaggaaatgccagtaagcatgcttttatgctattgtttataagactgcaatagcgttccattgtatggatgtgccctcatttattttgtgctaaatgctttacgtatattatcagttaatcttcacactcaatgaagtagatataaatactattatcttacaaatgagaaaattgagagacagagatgttaagaaaattgctcaaagacatgcaactcatgggtggtggagctagaacttgagtccaggtctctctgattctaaagataataaatattaataatcttgcccaaaagacatgattttctttctttttttttttttgacagagtcttgctctgttgcccaggctggagtgcagtggtatgacctcagctcactgcggcctccgcctcccaggttcaagcgattctcctgcctcagcatcctgagtagctgggattacagcactgtgcctggctaattttttgtatttttagtagagatggggtttcatcattttggacaggctggtctcaaactcctgacctcaggcgatctgcccaccttggtttcccaaagtgctgggattacaggcgtgagccactgcgcctggcccaaaagacatgattttcaagagagggatggccccgatacccagcactgtggtccagtagcatggcctgtgtggttgaaactgacaatacagaagtaggcttgagggtgaggaaacagaggcgagccttcaactcccttcagggtttattattttcttgtgtttagcctcattaccagtggtgtgtaaaaaaaaaaagaaaaagagtcataacaccccaactagttcctctttctaaatgcctcagtggtcaacagagtctaaatgctgctccgaggctgaattatgtacaatgcaaagtggacgttagtttaatgacacagttattgctggttgtggtgtgagcagtttcattggtgtagtgatgcagaacccaagtgggttagagtgagcgaggggtaagagagagaagagtattagaattctggcaatgaaaacaagcatagagagcagtggtcagaagtgggcatgggtttgagggagagggaggcttttttttttggactgctgctgtttttaaggatgaaagagacttgtttaactgccagttgcgcagtattggtagagaagaaggcattaggttgaagattggagagtaggatggaggctcctgggaaggcggaggaagctagaattgccaccgaaggggcggtgtactttttccattgtttgtggagaaggaagggaagtttgttttgtggcaggaagttaaggggttctttgcttatatctggagttttctctctgaatagatgatgaagccttctaagggtgggggtggtttgaagtggggattagaaattttcacaacttttatgggctttttgataaatgatttggacagtgtgggagtgagctgatgtaagggagtatgaaaagggtgcctggcaatgttggagggtctggttgtagaatgtatcgtgtctgtccgtgtgtttgcttgattttgtttctcctctagcagtgtgctcacacacccaggtctggtagagcaagtgggtttttacgagttgggtgaatgggcagtggggagggaacaacatttagatattgctgtaagtgattgaagttctgggccatggaatggatgctgagtaaagaaggaaggaagtaaagacatgaatggatggaatgtcaaggaactttaggtcccaagaggctgagaaaccaaggatgttgggaagaggaagagcctgaaatataggggatgccgtttagagggagatgtgtgggtttctccctggtgacggtctgggagaggctgtggaatggaaggaaacattgcttgcttagaggctggtgttgtatgtatgagccacctggatctcgagggcacttaggttgtggaagggcttggaaaggaagcctgagaaccagctgcttgaatcttcagggcatcaggagaaatggcagagctgtcagtggatgacagctgtgcgggagagatacaggatgtatgtcactggatggcacgagcctcagaagggttttcacagggcggttggggagtggtggtcaggagctgtgtggaacgaggagcatgtcagcagcagctcctggccttgggggctgggcgaggcttgtggaatgcgagcagctcacagagggaccgatggcagggaggcccgattctcagggagagccaggtttcagaatttgaatgggcagaagaacgacaagactttattaactatggcgtgggtcttccagagagcttggcagaaagatctgagaggaacgagataagtggaagtccatgttggaagaaaggaaggcagaggagcgtgaggatgaaaggctggaagcctctacttgtcattctcagggcagtggggttttgaggcagaatgggactagctggtttttgtttgataagggaagagatccctttgttgggagatgggggttgcctagaattcttaagacccagctgtggcctggacagatggcacttgtgataaagaccacgtctctctggagtgactcaattgtaaattttggatcaaatggacgttcttcggaacggccttgggccacagttgttgggcatgtcagctcttggggcataaggggagaccttatgtggtagggtgagtggggcccagtaggtggagtgccctgctggatgaccgattagactgtcattctgtgctgggtcttctaaaatgttgaacttctgaaggaaaaaaaaattgccagggatgtctggagatgaccagggacgtatccacgtggagtgatggtgttacacttctagcatagcaaaaatgagccttcttgactatgattcttgtgcttggtcacctgttcttagacctgactgtacatgtgcgcccgtgaccttgtgatctttggacattgtgcattgtggacacacgatgtggaaggacatagaacaaaatgatgtagtggttgtctctgattatggaattgtgtgtgtatgcttttcgttcttttaaaaaattgtttactataggtattcaaaaatagagataaatgtatatttttaaattttcctaagttagatcctgaatttcatggaggaaaaatttactacaaacttatctttggagttttactggtctgcctgttttatgaatactgtgagtcctataaatgtgtttctctccagaaattccaagtagtgtctctggcccagtttcagctggtgtgcagtgtttcattgtgagtgtgttttgctagcctcattcctggctctactttttccctctgtccttgttttttctttccttttcacctacttctaatttatgtcatttgattgtattttacctatcactatatcttttctagaacaaattgtggtaaaaataagtaaaataaatactgggtcagagagtgtgcaagcatccatttatttatttatttattttttgagacggagtcatcctgtgtcacccaggctggagtgtagtgatgcgatctcggctcactgcaacctccgcctcccagattcaagcaattctcctgcctcagcctcccgagtagctgggactacaggcatggaccaccgcacccggctaatttttgtgtttttagtagagatggggtttcaccatgttggccaggctggtcttgaactcttgaccaagtgatctgcccaccttggcctcccaaagtgctgggattacaggtgtgagccaccgtagtggaccttgagcatccctttcatgataacttcttacgttattgctttccaaagcatcaagcaggtttttcttgctgtattaagttcccaatgtccttaaaggagcttttaaaaaatgagcattgtgtgtgtgtgagactataaaaatagtgtatgagaatggtgtaaaatttggaaataagagtgaatataaagaggacagttctcattattagctttaaatttttcttctaaattttttaatatccagatattaatgtaaatgaaatccttatgtacaattaattttgtatcctcccattttcccttaaaacaacaggccgggcatggtgcctcatgcctataatcccagcactttgggaagctgaggtgggtggatcacttgaggtcaggaatttgagaccagcctggtcaacatggtgaaaccccgtctctactaaaaatacaaaaattatctgggtgtggtggcgcacgcctgtagtcccagctacttgggaggctaaggcaggagaatcacctgaacctgggaggtgtggaggttgcagtgagccgagatcatgccactatactccagcctggtcgacagagtgagactccatctcaaaaaaaaccccccaaaacaacaatgtcttataccctggttgtggtggctcatgcctgtgatcccatcactttggaaggctgagacagaggattgcttaaggtcaggagttagagaccagcctgggcaacatagtgagacgcctatctctacaaaaaaaacaaacaaaaaaaacaccaaaaatcagccagatatggtggcatgtgcctgtagtccaggtacttgggaggctgaggtgggaggattgcctgagcccaggagtttgaggctacagtgagctatgattgtgccactgccttccagcctgggggactgtatttaatttttttttttttttttttgcgagacagtctcactctgtcgcccaggctggagtgcagtggcgcgatcttggctcagtgtaacctctgcctcccaggttcaagcagttctcctgcctcagcctccagagtacagtagctgagactacaggtatgcaccaccatgcctggctaatttttgtatttttagtagagacagggtttcaccatgttggccaggctggtcttgaactcctgacttcaagtgatccgcctgcctcggcctcccgaagtgttgggattacaggcatgagccaccactcctggctcttatctaaatttaaaaaaaaaaaaaaagtcttaccaacaaaattactgacagccatagaataaatatgccataatttcattaatagtttttaattattgaatatttaggttgctttgattccttgctgatttaaataatattgcaatgaagatcattatgcaaatatccttgccacagtttagacattattatccaatggtagattcctagaagtagaaaagcagtgattagacataactagaaaagaaaatcatagagactataggtgaatatttttataagcttgcagtggggatggccttcttactgaagaccccaaaagtagcataaagggcaaatatggatgaaatcaacaataaaacaatggaaagattctgtatcagacaaaccatttggaaattatgataggcaaatggtaataaagaacttacacaaatgaaaaagacttgactcaatttttatttttatttttatttattttttgagttgaggtcttactctgtggctcacactggagtgcagtggtgcagtcttggctagctgtaacctctgcctcccaggctcaagcgatcctcccacctcagcgtcctgagtagcagggactacaggtgcatgccaccatgcccggctaatttttgcattttttgtagagacagggttttgccatgttgctcaggctggtcttgaactcctggactcaagctatctgcctgcctcggcctcccaaagtgctaagattataggcatgagccactgcgcctggctggacttataatttttaaaaagacccctgataaaagaagaaaaatacttttcttcttttggccaataaacatttgaaaggatgttcaaccccaatagtaattaaagaaacaactgtaaacaaagatgatgtattatttttcatttatcagtccaccaaagataactagttcctgagaatacgtggtaagaatataaattgctatatttctgaaagcagtttgtcaattaaaaagtatatgtacacttttgtccagcaattctatctttaggaatttattttaagggaattacgaggtgctcaatgatgtttacaaaagtattgtttattgatggaaaaattggaaacaacttaaatggggatttggtttaattatcgtgtaaccattcagtggaatactatgtatgtgttaaaatgactgtacatctgaacttactgctgcagaaagatgtccaagatgtgctaaaagagatacagacaatgagtaaatgaatgaatatgcgtagaaaaatatggaaacatataaaccatgttaattgtgtttttctgtatttagagggattatggctgatcttttattttctatttatttttcttgaagttttaaaataagtatataacccgaataaatagaaggaaaaaaaaaaagcctgttccccaaaagtgaaattggttgtggcaaaaataaaacgtgtgttctattgtgctgtcttttgtagttaccaaaaatgatttcaaattagagtagaaatattacataaactgtaatttatgaaatggatctgaaaaacataagagaaatgatcagttaatagtgtaactttttttttttttttttgagacagggtctcttgctctgtttcccaggctggagtgcagtggtgcagtcttgactcactgcaacctccccctctggggttcaagcaattcttgtgcctcagctgcctgagtagctgggattacaggcacccaccaccacaactggctaatttttgtatttttaatagagacagggtttcaccatgttggccaggctgatcttgaactaccgaccccaaatgatcagcccacctcggcctcccaaagtgctgggattacaggtgtgagccactgcgcccagccaataatcgtgtaacatttaagaaggcaaaaagtagagccttccatcagtttggtttacaatgaaaaccagttgctttaatttgtcacctttcaaaatatgtctttcattagcccttaatcattggcaagttctcacatggagcctatcggggggagatgggaggtcttgaacttcccttccaacctgcttttgtttttttgagacaaggtctcactctgtcgcctaggctgaagtgcagtggcacagtcagctcactgcagtcgtctcgacctcctgggctcagacaatcctcctgcctcagcctctgagtagtagggactgcaagtatgcactaccacacctggctaatttaaaacttttttttgcagagatggggtctcgctatgttgcccaggctggtctcaaactctagggctcaagctaatccttccttcttggcctcttaaagggctgggattacaggcatgagccaccacgccctgccctaactctcttcttactgttgaacctagggctcaaggaggcttagtgacatgttagggatctggtagggatgcaagaactgcataggcgcagagtccttcctactccacctgtgcgggtggtgtggggatgggagtatcaggccacttgttcccaatatttctgtcatgctgtgcttgaaaatttgtcaacaatgacttgctctctggatttaagtgttgtcttttttcctctctctccagtcctacaatgctagttcctttgggaaaatcatctgataagtcacaaatacctacattgagtgaatttccccacatcttcacccttgcaaacacagaggaaggtcgtgtttcataggcatatgctggtgtgtgggacttgaagaggggaaacaatgcagttagttgggggtcagtccaagaatgagtccttgaacttcaccattttgctaagacagtgaacacaggttttggggaggatgaaatcataatttttgatgctagagctgttcacagctttttctttgatgaatgactctcgttcatgtgcttaaagattttcttggtgctgtgaattaaaacagacttttggcttgaaagagtaaatttatgagatgtagcttgacccatttttatcttgtactttaatttctgagaaccatgacagtcatatagtgtgtatcctcatagggaaaaatggcttatgtgagacacggtgtaatttgtgccagtaaatgagtaaaaatcttgttttggtaaaaatcaactcaattttatttaacattgattttcattattaaagtgctgcaatcacatttcagaaaactttaaaaattgagaaaaagggatgagattattaatatttttctgcaatgcaatggcatttttgtattatttctagattttttcttatctgtctaaaatataacagttccagggttgtggtttggcagaatgtggcaaattaagcaaaaccttttctattttcatctaatctgcccccgaaatgagcagtgatctattatctttactttttgtttatttcctctttggcaaaacttgtcagcatatttagcagaaggtggagacaatttcttttcacagatttggatttagtagcaatatcctaagtggattttttctgctaaaagaaattgttagagttaagcttggaggaaatgaatcaaatgtttctaaacaattctgggggatagttgaattctatttcctgacggtagggaaaaaaaaaaaactggctttttttttttttttttttttttttttttttgagacggagtctcgctctgtcacccaggctggagtgcagtggtgcaatctcggaaaactggcatttttattccagctcgttgaatttttaactgggctaagtgtcccagactggtctattctgtgttggtaaactctgccatttggctgttgtgtttggtggaaggaaaatatgatcttgcctagtttggttattctaagagcttttttccttcccttcagccaagatatgctattcccttatgcttatttttttccattctcttctttgcagagtactcgggtggagtttgacctcccagaatattctgttcgtcgaagataccaggattttgactggttgaggagcaaactggaagaatcccagcccactcatctcattcccgtaggtagtaagtcactacagcttgtttctcacttgtcctgtgttgtctttcctgaaggggttcactcaactctcatcccttaagttatacagactcacccagcaaacatatataaaacatgttaacggacactgtatacaatacttcacctattaggttttagtttctgatttggtatatagaaagccagttttgcggctggctgggctttctttagccacagcggcagaaatctagcacagaatccattgccacagtttttcatttaaaaaacaagaaaccacctaacactgtttattgaagcaacgtgacatttatctactccagcgcttccatctgcacagtttttaaaaaacagaaccagagcaaaagaaatttaaatcttttttttttttttttttgagacagagtcgcactctcttgcccaggcaggtgcgcaatggcatgatcgcagctcactgcaacctccgactcccaggttcaagtggatcacctgcccctaccaggttcaagtggatcacctgccccagccttctgggtagctgggattacaggcatatgccaccacgcccagctagtttttgtatttttagtagagatggggttttgccatattggccaggctggtctcgaactcctgatctcaggtgatccaccgacctcagcctcccaaagtgccgggattacgggtgtgagccaccgtgcctggcctcaacatttatattgagtacttttctgactacttttgttaaaagtagaaataataacggtttggacaccagatgtttctttgggccttgggggctttagagcagtttgagtcataaaactcctcagaggggctgatttatctttcagcaaaaacctttgttgaatgataacttcctaggactaccaactttctgttactaccgcatctcccagcctttttccccccatggttagaagaggctgtgtatgttgtgaatgcactggcagttttctcagttttcagggtgaaaagagccacgttgccagtactgtgataggaacgatggctctcacctgggactcagttctttctcagggtatctcctttttcctccacatacttttctgttctccgagcctgaagttttgctttttctgtcttctaaccacttaaaaacatgcctgaagaggaaacagtagtttttaaacagttgggaatattccttaaaatagaatcctaaggtggcaaaataggcagttagtgaataatttttaaaaaataaactgcattttagaacattatcagaattacagaattattgtgaaggtagtagagagaattctcaagcctcacatccggtattaacattttatattagtgtggcacttttgtcaaaatgaaccagtcattatgaaataaacaccattattaactaaaagtcttttattccaagttcctttttatttttctttctttcttttttttttttttttttttgagatgaagtttacctctgtcacccaggctggagtgcagtggcatgatcttggctcactgcaacctccgcccccggagttcaagcgattcttctgcctcagcctcctgagtagctgggattacaggtgcacaccaccatgcccagctaatttttgtatttttagtggagatgagatttcagcatgttggccaggctggtctcaaactcttgatctcaggtaatcctcccacctcggcctcccaaagtgctgggattacaggtgtgagccaccacgcccggcccaagttccttttttctgttccaggatcctacccaggatcccacattttatttagcagtcatgtctccttaggctcttcttggttgtaacagtttgtcaggctttcccttttttggatgaccatgactgttttgaggagtactagtcaggaattttgtagacttgtccctcagttgacatttgtctgacggctttcccaatcggggtaatgtgtttggggaggaaaccacagaggcaagctgccaccctcatcacctatccagggcacgtgctgtcaacagtgtgcctcaccattgatgtgaacctccatcgcctgacttgaggtagtgctggtcagctttcttcactgtacaattactctttctcccagcctttttgtactgtactctttggaagaaagtcactgtttatttatagcccacaccatgcatcagggagctgccctcctggcagctggtgcctgtgaggttgatactggaagcgcaaaggtaagacagtgacacctgctggttgaaacatagtgtctactcttccatagacactagaagagaatggaagaatttccggaatgcccaaagtggatccagaatatctttaagtgtggtttctgatggtctggatagaagcagttggtaggaagctactttagaaacaagcagaaacttaattttttttcataaattcttggtacttgcatatctggagtggagatttaatatgggagagcctctctgatttaagtatgaaagtcaaaccagcaaccaacccccctcatctgctacaaaaaaattttatagtagctttgctaggaggtgtctgtctgttatttaagtgtcatctttgggaggaagagaggatgggatgagaaggttataaggaagacaaaggacccctgccttggggaacttattatcagttggagacccagcaaacatgcagaaatgttcatttccctttttaagaaaggatttattgagattatataacatataattcacccatttaaaatgtacaattcaaaggcttttagtatattcataaaattggacaaccatcagcattatccattttcaaatctttttatcaccccaaaaagaaacctcacatcccttagctgtcacttacaaacactgtatatctcccagcccctggcaaccactcatgtactttctacagatttgcctattctggacatttcatgtaagtgaaatgatacacaacgtgattttttttgttactgggttttttcacttagcatattttcaaggttcatccatgttgtagcatatattaatatttaattcctttttattgccatataatattctagtttatggataataccacattttgtctattcacccttgatggacgttttggttgtttcaccttttggctattatgagtaatgctgctgtgagcgttcatgtacaagtttttctgtggacatgttcccattttggggggggtgtattcttaggaatgtaattgttgaatcatacataactctataattggccttttgaggaactgccagactgttttcaaaagtgatgacagcaacttacatttccacacgcgatgtataggagtttctccacatctccatcaatgctgttactgtctgtcttttggattgtagccattctactggatgtgcagtgctatctcattgtgattttaatttgtatttccctaatgatgttgagcatcttttcatgtgcttttgggcatttgcatatcttccttggagaaatatcaattaagatccattgcccatttaaaaattggggtgccttttcatccttaaattttcatagttcttttttcaaattttatatatatgtgtgtatatatatatgtgtgtgtgtatatatgtgtatatatgtgtgtgtgtatatgtgtgtatatatatgtgtgtgtatataattttttttttgaggcggagtctcaccctgtcacccaggctggagtgcagtggtgtgatctcggctcactgcaagctccgtctcccgggttcacgtcattctcctgcctcagcctccctagtacctgggactacaggcgcccgccaccatgcctggctaattttttgtatttttagtagaaacagggtttcaccatgttagccaggatggtctccatctcctgacctcgtgttccgcctgacttggcttcccaaagtgctgggattacaggcttgagccactgcgcccagccccattatatgtataaaattttaagaggcaggaatgttgttttgtcacccaggctggagtgcagtggtatgatcacagctcactgcagcctcgacctcccaggatcaagcgattctcccacctcaacctcctcaggtatgtgtcaccatgcctggctgatttttaatttttttttgtagagacaaggtgtcactgtgttgcccaggctggtcttgaactcttgggctcaagtgatcttcccacctcagcctctcgaatagctgggactacaggcaccctatgccatcatgcctggctaattctttttttggtagagacagagtcttgctatgttgcccaggctggtctcaaactcctggcctcaagggatcctcctgcctttgccttctaaagtgctgggattacaggcatgagccaccgcgcctggccaagagtaaccatatgttcttaaaatgccttcttggaaccagaagtatgctggttgtatatgtttgtcatctcataacagcagttcactgtgtttttcttcattatgtaatagttggagctgccagaaagtcttcattatgactttttccctctgttttttttaaagcttttttgagatataatggatatacagaatagccttgcacatatttaatgcatacgattcgataggcttgtatgtacccctgataccatcaccacaatcaaggtaataaacagatccatcaccttcacaagttttcttttgtccctttgctgttttgttttttttttttttttttttgtaagaacctgtaacataagatgtacataatgtgtaacatgaacatgtaacataagatctctcgtcttatcacattttacagcatgcagcaccatacagtcattcccccttatttgtggttttgctttccatggtttcagttacctgtagaccaaaaatatgacatggaaaattccaaaaataaacagttcataagttttacattgtttgctgttctgaatagtgtgatgaaatctcatgcagtcccgcctaggacataaattatctttgtccggtgtatccacgctgtagacattgcccacctgtgagtcctttagtagccctcttggttatcaggctggagatcacaagaagaagaatgaatacagtaccataagatgttttgagagagaaagagaaaggccaaatccccataacacttattacagaatattgttataattgttctattattgtgaatctcttactctgcctgatttgcaaactaaattttactataggtatgtataggaaaaaacatatacatatataggtatgtatatacaggtgggaagttcacttgagcccaagagttcaagaccagcctgggcaacacagtgacaccttgtttctaaattttattataggtgtgtatatataggaaaaacatagtatatacagggttcaataccatccatggcttcagcatctgctgggggtcttggaatgtatccccctaggataagggaggatgactgtattgttaactataggtaccactttgtacagcagatatctggaacaacttatttatgttttataacactagctttatatccattgaacaactccccatttcccactctccgtacccctggcaaccaccattctattttctgcttcggtatttgttcagtgggtttgacacttctgcatttcctggagcactagttacacagcagagcaatttcatgattagatgggtgcccgtattagatttggaagatgaagcagatacattgaataaacacttgagtgtttaattttcacttggaaatttaatgtttacctcagttttaaggaagaaagctttctggaaggatacatttgtattatgtccaagttttcttttgagtagtagtaaactcagaggaattaatgagaataaatttgtaatgcaacaattttttttttaatatgaaataataaaaactccattttctagttgggttcttcttttttctactgttaaaaatatacctgcgtttagcttattcaatggataagttaataagtattgaaacattggttcaacttcctaatgctttgcattaaactgggcttggtgattattgtttttaatctctgcgcttggtgacaagcttttaatctctatgctcctttatttatttggtagtaatttttgcttagaagcagtattttctattagttcgacaagggtaggagaaataggcctctgccatgtaaatatttaatgtgcactaaatatttgttgaattgcttagaagaagcaagtcatttgctgacgaggaagttggacatttcaggattcagcaattgaaagatttgtctagatttcctacccagaaatagcagctttccattgacagtctacaacaaatatgctattgtttcagattataaaacagctttataaactaatatggaatataaatgacagtgctttactaaagtactaagtactatctaatatcagtatttcaagattaaaccctgaaatatttaatggattattgtaatactttgcaaataggatttttttgcaggatccaacatatatatgtgtatattcagtttctaaaaatgttttcattgtagaaaatattaaccatattgaagagattcagtacgatgagtcccgttgaaactccatcactcagtttcaacatttatcagctcatggccaatcttgtttcatcactgtccactccctcacccctacacccaggtgtttttttttttttaagtaccttaaacaacagaaatttattctcttacagctctggaggtcaaaagtccaaaatcagttttagtgagctaatatcaacatataggctagggctgcattccaccagaaggctctaggggagaatttgtttgcctaccttttctagctcttggggctgtctgcattccttggctcatggcctctttattttcaaagccagcagcatatctgtcatcatctctgcttccaccatcacatctccttttcttaaaaaaggaagtaaaatccatattacacatcaccattttaaccattctgaagtgtccaattcagtgacttttagtacattcacagtgttgtacgaccatcaccaccattgagtgttgtacgaccatcaccactatttaatccagaacattttcattacccccaaaagaaactttgtacccattaaggaaccactctcaattccctccttttcccagcccggctataatgaagaatgctgctatcaacactggtggttgtctaagattttgtttgagcacttattttcagttaccttggctatacaacaagaagtggaattgctggagcatatagtaattctgtgtttaattttttgaggaattgttcaaacggttttccacagtggcttataattttatatctgcactagaaatgtatgagggcccaatttctccacgtatttgccaacatttgctattttactttaaaaattctagtgggtgtgaagaagtagatcccaaatgacttgtttttttgagacaggatctcactctgtcacccaggctggagtgcattggcatgaccatagcttactgcagcctccaactcctgggttcaagcaatcctcccacctcagcctccacagtagctgggacttcaggcgtgcaccaccatggccagctaattttttattttttgtagagatggggtcttgctatgttgcccaagctggtctggagctcctagcctcaagcaatcctcccagcttgacctcccaaaatgctaggattatagacatgagccactgtgtctgcttcccccaatcgattttttaagacattttggcctaaacgttatatagacattctacctgtaagtccactcccctttttgctttttgttctcggtgcttacaaattaataaaaatacttggcatttgttagacatctgctgtgtgcctggaactgtgttgagctcttttcatttacatgatgtggtttacagactatagatggacttgatttcacctgcaacccagattcctatgtgtaaacaacccagacagtaatagaggtgaggctgagagtaggtgtgtcccgtaaggaatcttgaaatagcaagaaatttctgaagctacatacatttggaaatgataacgcttatgacaggaggaaattctgcttgcagaaggattctctctagggttcctttaaatatcaagtttccccgattgatgaaacataagttcaatttgctaaatctgaagaatggacccctattgtagaatgtcatctttatgttaaatgaggcactcctaaccacttacttgcgcctcaggccatcctctcaagtcttattcagcagaagcaaatgagagtatcgtaacaggactcatgaagtaagaacaggaaaatatccactggatttggtaattagaaagtcattggcactcaattttaaaagggccgtttctgcactgggtggggatagggcagagaaacccagcactgaaggcagtatcacagctggttttgctttgagggttggcagaaggctgggggttgagaaatcaatgggatacagtgaagtcaagataagtgactcctttcaaaaagattgaatgagccaggaaggacaagggagaagatataaggtcaaggggtggttggattcgtattttttaggaagaaaaaccaaccatatttttatagattctgggaatagagctggatgaacaggagatgttgaagatacagggaagagattaatgacaggtgcaccccaatgaacaaatgggtcaaggacacagatggaatgcttagctttaggggaggaggggttgttttccacaggggctaaggaatggaggtgagggtgatgcccagtcaatgggcttctgtggaggaagcaaaataggaaatttccatctgatgctcttacacctggttctcacttcagaaagatagtaatctgcttagcacgaaaagctggggtatgagaatggctgcctaaaggaacgggggagagaagaactgaccagaataaaggaattatcctaaaggacagccatatcccattaagataacttctcagtgctttggactgggccagcatcgggctgagtggcccgtctgtctgatccagcactgcatttcgaatattctactcaagtgtaagctctgctgggtgtcacacgtggacatgttatccttgtgtgggtctgtaattttattcctgactctattcccctctcttctttcatttacaaacctttccactgtgccctttttggaactcctgctctgtcataaagaatcccccagtattcttaacatcttctctgaatattcccaccatgtcaaggtttaaatgaacactggatgtccctgaagattagtagtcccctgaagctgctgccagtcttacaacaaagacacccaaacttgtgtgtgtttaccctgtggtaggaatcattcaaagcactttcagcatattagctaatttaatcctcatgacaaccctgtgaagttgatgctattagtttttacctagcaccaacttcttgaggtaccaagaaatgtatagaacttgacggtaggcaaacagctagtaggtggcaaagtcaaaagataaacccaggaagcatggcatcagaatctttactcttgataactaaaacatactttctgaagctctttcaagttgagggcactgaattccctcatactccaaatacttcttttccagggggtggggtgttggtgttaccaattcctaaatcttttcaaggttttgtgttctaaatctaggtttactaggcctactccaagtggcctagtattccacttttttgggttggctaagtccactaatccttgttgctatgtcttatttctggtttgtttttgtccttcagggtttataattttaaaaaatcctctttattgccatattatgggggtttgaggaggttgtggagttaaatgcttgtgtttaatgtcttactttgaacttgaactgctaggttggtttaacattagaaaatatattaatttaccacttaccgtattaaaggaaaaagcatgtgattgtcctgatagacctgcttggccaacgttgtcttggtttattccctaaagaggcttgcattttctaaagaggctgcatctgcacgagtgttcacagcagcattgttagtagggctataaagctgaaaaccattcacatgatcatgcacacgttcacaggcaggagagtaggtggacaatttgtcacacagtcagttatatagtgcgtgactatggaacagtaaaattattttcctgtagctaaacatacatcaatatggataagtcgcagaaagacaatgttgaatgacaaaagcgaactatacaggtgtgtactgcatagtgacatttctgtcaatggtggatggcatatagatggtggtcccataagattataatactgtatttttactgtaccttttctacatttaaatatgtttaggtacccaagtacttgccattgtgttacaattgtctacagtagtcagcacagtaacatgctaggagcaatagcctataccgtatcgcctcggtgtgtagtagccgcaccatctaggtttgtgtaggtgcactctgtgatgttcacacaatgatgaaattgcctgacaatgcatttctcagagtgtatctctgtcattaagtgacacattaactgtaattttattttttataaagttaaacaagctcaacgaacagtacatggttttaaaactgaaacttagaggggagcaatgaccaaaaagttgaggattgttaattccttcatgggggcaggaataagcggagatctgatcagggatccgttgacagggaactttgtcaatggcagtgttctctctgtcaagttgagtggtagattaataagtgctggtactattattatgctttatgactttgaggtatgtaatacactcttttattgtgctaaaaaacatagcaccattttataatctacaattcagtggcatcaaatacattcacaatgttgtgcatctgtcaccaccttctgaaaagtttcagaatcaccctggaaggaaaccctgtacccatgaagcagtcacatctcatttcccccgatctctccagcccctggcaaccaccatctactgtctgtctctgtgggtttgcctattctggacatttcacatgaatggaatcatatatatggacttttgtatctggctgttttcatttaccataatgtttccagggtttttccatgatgtagcatgttttagtacttagtttttatgacaaactattagtccattgcatggatatgccgcattttgtttgcccattcacatgttgatggacatttggattgcttctgccttttggtcattgtaaacaaggctgttatgactatttgtgtacaaaattttgtttgggcacctgctttcaattttttttttaaagttttaaaaaatgtttgtttgtttgagatgaagtctcactctgtaacccaggctggagtgcagtggtgcaatctccactcactgcaacctccccatcttgccagcctaagctatcctcccacctcagcctcctgaatagttgggactataggtgcaagccaccatgcccagctaattgtttttatatttaatatttttggtagagacgtggtttcaccatgttgcccaggctggtctcgaactcctgagttgaggcaatccacctgccttggcctcccaaagtgctgggattacaggcatgagccaccacgcccagccttgctttcagttcttttgggcataaatctgtgagtggaattggtgagttttatggtaattctaaatttaacttattgaggaaccaccaaactgttttccacagtggctgcacattttacattcccaccagcaatgtataaatgttctgatttctccacatcctcaccaacacttgtttttttttgtttgttttgtttttgtttttttttaagattatggccatcttagcaggtatgaaatggcgtatcatgatggttttactgatgttaagcatcttttcatgtgcttcttagccatttggatatcttctttagagaaatatctattagatttagttgcctattttttaaatgtacaattttaaaaatatttcatagctcaaatattttaaaacatgtgcatagcagatacttcttttccctgtggtagtaataatgaagaaggctttttaatcaagcagttgatcaaactactatggaaacagattaaaagctcaaagatcccttggtaggcaggtagttttaaattgcccacagtattgactctaagtcagtataatagagaaatgtatttgaataaggggaataaaggaaattacgttttaaataacttttgagtataaacctaaaccaaaaaattggcctataaaaggtattttttttagatacatgaatttacctaatttattcattcaccaagtatgaatggggaatgaagtactgggagcagaatcttaaaatatttaaataaatttttatgtggttgatgcctgcctgcctgcttgccttctttcttttctttttctttttcttcttttcttttcttcttgccataacttttccatcatatcacgtgtacatcaagcaatgtaaaaattactgttgaatttactggataaatatctacttttctgtatttcagagactataatttagtgttttattccttgcattataaaattgacagggtatttactccatgtgtatttttcagaagtctttatattaatgactacatgaagatctgcctgattaagaaatacttttcttggatagaggggtaatagaactgtgtgctagcctggttgtttttccttgcaccatctcatcaattactctggtttttttcttcatgtcttcatagcctcttcccgagaagtttgtggtaaaaggtgttgtggatcgtttttcagaagagtttgtggagaccagaagaaaagctttggataaatttctaaaaagaattacggaccatcctgtgctgtctttcaatgaacactttaatattttccttactgctaaggtaagggcagaaatttacatcctcttcgtccatattaccattcttggggctctttcctaaaagctgttttgagcaagactcggtctctacaaaaacttttaacaaatagccgagtgtgatgttgtgcgcctgtagtcccagctacctgggaggctaaggcaggaggtagcttgagcccaggagtttgaggcttcagtgagctatgatcgtgccactgcactgcagcctgggtgacagagtgagaccctatctctttaaaaaaaaaaaaaaaaaaagcggttttgatctttcagaagccaccttcatgagcaaatggttcactgtaacagggttgtcataaaattggtctttttttgggtgcctgtgtccattagcatgcttttttgcattagcaaatccatatagatggattctatgttagaatttaggagatctgtccccaccccatccggggccccacccacttgcagcagcagaggaagttagaatatttgctctgccaaaagcagagctaagtgtttccttaaacacttggcagtattactgggtgaggccagtctgaccaacaatgggcatggaacagaaggaacatttgagtgtttggtgagggttttcttcttaagggcgctttgagtgattacttgcagctgcattttacagacaaggaaactcaagttccaggagcttgtccttgttcaggtagcgtcactaggatctcaaattaggtctttgtggctactgaggccacaccgtccctgtgtatcagactgcctgattgttacttaacctgcaaccatgttcctgtcaggtggacatttgccagataaaacatttgggtcctacacagttgccagattctgtgtattcaaactcaagttggttgtccactggcctttctctgcacttccctgttggcagaactggccagaaaacctgaggtgctgtgctctcgctgtctgcagaaatggggtcacatgctcagaccctcctgctagcttccctctagtcccatctgtttggtttcaggtatcatattcccatgttcaggccatatgtaacatgttccatgttggcaagggtattgtggtccagatactttctagtttttcaaatctgcaaaattgggaaatagctatagataacattaggtgacattaaagacttcggagagtgtgccgttcttcactcagtggaagccgcatgacagagtcctttagtttttataacctcagttggcattgagccttattgatgacattccagttcagcatctctttttcccagaggctttccccccctacaggttggacaggtacactttttaaaactaagtatttcctggcaaactaaacctcaggtataattccttcaactcatactcaaagtagaatacatcctattctccaaaagcacaactcactttctcccccaaggtccattttccagaaagcccttaagcacattcatgtttactgaacaaaaaagaaaagggagggaaaagcttggacnnnnnnnnnnnnnnnnnnnnnnnnnnnnnnnnnnnnnnntttatctatctgtgggccaggcagtatgaaaatgacttaaaaaatataaggtccttatatgagaacacatggacacaggaaggggaacatcacacgccggggactgttgtggggttgggggaggggggagggatagcattacgagatatacctaatgctaaatgacgagttaatgggtgcagcacaccaacatggcacatgtatacacatgtaacaaatctgcacgttgtgcacatgtaccctaaaacttaaagtataataataaaaaatttaaaaaaaattagaaaaaatatatattatatattaatatataataaatatattaatatataatatataataaatataatatatataaaatatctatatatataaggtcctttactgccttaatcaaaatccgactccatatgagtgaatacaggagaggtggctttaaacagaacaaattttagccctaattcagtatcgcttgctgaacaaaatgtgctaaatggccttatcttttctttaaaaatttttaaaattgtgataaaatacacctaacatttactatcctaacaatttctaagtgtacagttcagtagtgttaagtatatttaaattagttatgcagctcatcttcagaacgtttgcatcttgcagatctgaaactctatgcccattaaatggcagcaccctattccccctcttccagctgcctcattttttcctttaacataccttgaataacttgatcttgttctgagatgagccacttacgtgttctgccttagggaatgcagagacgctcttccttttctttgtgatcacatgagtttatcaacaaattagaaatgtccttaagaagaagccaaaaggctgtatgtaatggctcatgcctgtaacacccagcgctttgggaggccaaagcaggtagaccacctgagcccaggagttcatgttcagtctgggcaacatggtgagaccccatctctatatattaaaaagaagcagcagcagcagccagtagtaatactgggagaaatggggacgctcaatagcaactatattcaagtcaatattttcatctttggcagagtgggtacagcaatcagatggatactgctgaataactttattcaacatgtaaattaacttggttaacggggacacgctttcaaagctctacttgaagcggagcctgtgcagtccagcgagcccatttgactctagtcccactcgtaaaaacgctgtctgcagaggtaattccaagaactctgaggcttcagttatagtcttgtgaaggccttgtgcctttgaggatgtttcttgtctagaatgtgggaggtcagaaggggagatggaatctttaggacactctctcaggcagcctgactctgaaggaaacgagagaggtggagaggaactagaggagattgctgctgtttttaagatgggtcagccttgggtgtattttacatgctgaaggattagaagttgaagatacagacaggagaggggataattggtagggcaaggccctcggttgggggaaggtatggataggtgttccagaaaaactctcaaaccatggttttcctctgctctcagacaacaacagttgtcatcaacacaggagaagacttctgtgaccaaattgcggggtgggggtgggggcgagattttccccaaacaccaagcagccattgccagctggatgtccaccagtttaatttgcacattatttgcctggacatagcatcagatcccacaggttgaggactcagtcctcaagtctgagagcttccagatctcggaccttaagttcaagcctccaaaacttctgaccagccagcttcaagttgggcttcccgtgacctcttctttgggttccattaatttgctagagcaattcacagaactcagagaaacacatttaccagtttattataaatgatatcacaaaggatacagatgaagagttgcattgggcgaggcgtgggggaaggggcgtggaacttccatgccctccctgggtgtagcacccttcaggaaactccacatgttcagctctccagaagttctctaaacccagctctcttgggtttttgtggaagcttcgtgacagcagcattccatcctccagggtgtagggagggaccttagtcagaaaggctggggaagattcgagtcctgccttggggcaggtgaaaggagggcaggggaaggacagagagattctgtttcctgaggcttaacacacccaacattatagtgaaaagactggaacaaggtctgtggaggttatgagccaggaaccgtggattaaacacacacacacacaaacacacacacacacacacacacacacacacacacacacacctacctcaataggaaaggctggatcaagagcaaaaatgaaggcctaaagaaggaagcgaagaaggaagtgaattcacgaggtgcctacactcagatactatagagacctcagcctgaaattgtacatcaaatgcggaggggctgttgggccatgttagccgcacattccacattctctgctctatcctctgcatcaggccacgtcaccagaaagctgtgtccttgttctgggttcctttatctccctctagttatacccttctaggtctggggattaacattctgtttgtattgagggtggatatgaggaacagacacctgtaccttctgtaaaaccattttgtaagctaccctttcagtaggtgacacaggacaacctgaagattgtatagattcctcttagtgtttgatgataggaggaagcttgttttatcaggcaggctaatatgcttttcttttttgcccaggctggagtgaagtggcacgatctcaattcattgcaacctctgccttccaggttcaaatgattctcgtgcctcagcctcctgagtagctgggactacaggtgcatgccaccatgcccaactaattttttttttttttttgtatttttagtagagacagggtttcaccatgttgaccaggctggtcttgaactcctgacctcaagtgatctgcccacctcagcctcccacagtactgagattacaggcatgagccaccatgcctagcctggctaataagctttatatttagatacaatgggttatgaaactcaacatatttccagttttgccttcaagaaatccagggttaaaatgttttgctgtttacagcatccatcctaggcctgagttttctagcaatgtttttctgccactgtttcctgctttccaccctttactccccttatatggctttagttggggtataaataaatgagtgatggatctcggaacctctgctcttcagttttgcttgtaaagacaacatagggtactttgtatgggagaaacagatacttaaaaaaaattatgttagaaacagcattgtgtttaaagggcagtgtgctcaggtgagtgaatttgattaaggattggcgttcagctctgctgaaagggatttaagtgtcaacctacaggagcctgagtctggtggttatgacgtccaggccagggtcctcctgtgaatgtgattagagcctctaactcagctccttgtttcccgagttctccatttccaaactgaagctgcttttagaagctgttttatttagtcctgcctatgtgagtgagtgagtgctttgagcttattcacatatcatcctcaggacctgaacgcctacaagaagcaagggatagcattgctgaccagaatgggcgagtcagtcaagcacgtcactggcggctacaagctgaggactcggccgcttgagtttgctgccataggtgactacttagatacatttgcactcaaactgggaaccattgatcgaatagcccagcggatcatcaaagaagaaataggtgagctgtctgttgaggtctcgattatgccctgcagccacattggcagaaatgccattcatgtgtgctacagagaatcaaactgcaaaatgctggagtgacagaactaggccatcttttgcttatcaaagaaatacaaggaggggaggagttacttgtgactggaatgtcactttgcaccccgtcctttgtcctgctgtgtcagccttgtgtttgcttttcccatggccagcactgctgattcgccaggtgtttcctcttttatgctctcttaactttagctttaaaagtggagacatagactcaactgcccttcatccatagggaacaataatttagtaaacaaacttagataccttttctggcagaaagatggttcagaaagatagcatggagacctgtgtttgccaaagttatgaccctgatgaatcttcagacttgtaattgactcacccaccccaccgtggttcattttaaacccactcctgcatgggggagttgccagggcctgtattgatccttcctcgtttttgcctccacttccttcccacccctctcggggccacctgctttgccacatcccataatgttgggatcttttatctccttacatatgcatggggcggacagacgtgagcagtgtaaatgatcgcactggcatgggaagcacgttgaggattccccagcagttgccattcatcggtcactaagccatgatgactgtgttctgttgcaacaatggcaagactcttggtgacaaatgatgggccagattttctttacgggggaaaaaaatcaacattttttttttctcatttcttgtacttgttccctctacttgacccactgatgataccatgtggggcccataggttttggagatagctgtggataccatccacacctaaggatcttgcagagtaaattctgatgggatccaaggggctgaggtggccaccgagtgatagagtgagtctgccagtgtaagaccacatctcttgtatcaaaatgtttcctaaaattccattgtttatccattgtgactgtttttgtttttcgttttttggtttttggttttttttttgagacagagtcttgctctgtcgcccaggctggagtgcagtggcaccatctcggctcactgcaagcgccgcctcccgggttcacgccattctcctgcctcagcctcctgagtagctgggactacaggtgcccgccaccacgcctggctaattttttgtatttttagtagagattgggtttcaccatgttagtcaggatggtctcgatctcctgaccccatgatccacccacctcggcctcccaaagtgctgggattacaggtgtgagccaccgtgcctggcccctgattttattttttaacctttaaaaacatctccctaaacctatatgaaactctgcctccattgcctgttaaaatactgcttcacactatgggtaggcgagtggttattttcttttttttttttttttttttttgacggagtctcgctttgttgcccaggctagagtgcagtggagtgatcttggctcactgcaacctctgcctcctgggttcaagcaattctcctgcctcagcctcctgagtagttgggactataggcgcctgccaccacacccggctaatttttttgtatttttagtagaaacggggtttcactgtgttagcaggatggtctcgatctcctgaccttgtgatccacccaccttggcctcctaaagtgctgggattacaggtatgagccaccaccaggccagcgagtggttattttcgaagatgtttggtggatgtggctgctactgcttttccccataaggcccattatccagagggatggcattcccatcacgggatggaatggattgatgtaacatgagctgtcagaggtttttaagcagttgtgctagaaatagtgttgtgtttaaagaagagtgggatcaggtgagtgaatggccaaagaaacacatgttcatgtagagagctcttggctgtggtgattactgagtcagtaatagcagcaactgctacccagccagattttaattagtttctgttccctgttcagagtaccttgtggagctgagagaatacgggcctgtgtactccacatggagcgccttggagggtgagctggccgaacccctggagggtgtgtcagcttgcattgggaactgctctacagccttagaagagctgacagatgacatgacagaagacttcctacctgtgctcagggaatatattttatactctgactccatgaaggtaagctggcttgcttcttgtgtatttgcatactttctttgtaatagcagttatcagaaagtaatggattattgcctgtttgcatgtgatataagtttccttcttcctgggtgggcaggatcagacacgtggactgacatcatggacatataaatggaacacatggtgaacgaagtacgtgaattaaacaaaaaaaaaagtttggtaagaaattcttactggtttctctgagagttcaagaagatataatgcctatgaaataagaacaaagatgccatggaaaagtaataattagagctcttggaagttaaaacatgattgctgaaataaaactgaataatcaagttggaaggtgaaattgaagaaatcttaaagtaagacaaaacaaaagttgctggaaaatagaacaaaaatgcaaaagtactgaaaatatgaaagaaaagagacataggggattaatcccaaaggttcagcatccgactgataagagttcctgagagaacagggaagactgagggaaggaaattgtaaaagaaataatacaagaaagtcccccaaagctgaagacataaatcgtctgattaaaaggacatgataattgcccagcaaaaggattgaaaagatcaccagcccaaagcatattattgtggaattttagaacaaaagtgatacgaatttgaaagctttttaaagcagagggaggggcagatgatgtataaaaggaacaagagtgagaatggctttggtctagcagcggtgaatgagaagaggaactatgaggacaaaaaaaatctttggcctcaaattctgtatgcagaatcggagtagagtgcaggaggaaatgcgccagtgcccacactggaaacttccccggcctgcacatagactggttggagaacatctcttcaggagactccgacgatgggggcactgattagtagaaaggcccagtctttatgaccaatagaaaaagatacgtggttcagtgttgaacattcccacctctaaatagcaccctcctgcttctcaaaggagacctctgaatgattaatctgtctttgggacaggtctagggcatcccatgaggaaagacctgaatagggactgacctgaattccagagagaaacctgtcagtcaacattgggttgtaaaaatgttaaaccagaaagatcgtagatccaggaaaacattgtacagcttgagaacaggaattaaaaaataatgaatcaactagttataaaaacaaattatgatggaaaactttaagcacatgccaaagcagagagaatagtgacaaactgccacatacccattctccttgttccgtcttgtcccatcaggtgtgaagggttgatacgtactaaactgtggacggtggaaaatggagcctctggtgaatccccttttcatgtgtgcgttataaagttgctaataaaacactttccaagccaggattgaatttggatctctcagtgaccagggaaatggtttgaatttccttatctataagttggaaatgatggtggtgataggataaagtcagatttgagatcattagcctgagaccactagttggaaattattggaactgaggctgtaagccaaaacttctggctgtgaatttgcagctcattctcttgtatcacactgacttttattaaaaaaaattgggatatacacattgaatttttgatcctatggccaaaacaagtatagaaagacatcctgactttcttaaaatgaactagaatatttcacttatcaaactaatggtatctgtgttttttgtttgtttgtttttttgagatggagtctcactctgtcatcaccaggctggagtgcagtggcacaatcgtggctcactgcaacctctgcctcctgggttcaagtgattctcgtgcctcagcctcccgagtagctgggattacaggcacccgccaccacacccagctaatttttgtatttttagtagagacggggtttccccatgttggccacccttgatctcctgaccttatgatccatccgcctcggcctcccaaagtgctgggattacaggtgtgagccactgcgcctggctgatatttctttttttttttgagacggagtcctgctctgtcacccaggctggagtgcagtggcacgatctcagctcaccgcaagctctgcctcccgggtccatgccattctcctgcctcagcctcctgagcagctgggaccacaggtgccccccaccacgcctggctaattttttgtatttttttagtgtcagccaggatggtctcgatctcctgacctcgtgatccgcccgcctcggcctcccaaagtgctgggattacaggcgtgagccactgcacctagccctggtatctgttcttaaaaataagtttttacaattcctggagtgtccgtggatttgtctcttatgtatacacacccttcatcaaatattctcttaaccttgccagatgaaaaatccaatgcatacacagcactgggatactatagtacaaattactctgttttttttcctgtggcaagtatgttagtacttagtatatatttgtatttgaagcacgatttaaaaatgtcatatagcaaggatttatctggcatctataaaacattacactgggagacatagcttgtgtaatttaagttagacatcaaagaaacatttgtttgctctttctttaccccccatgtgtggggcatatgtatggagtttcttgtttactgagcctgaaaaatcaggtcaatcaggctgagtgaatgggattgattgtacacagtcttgtctggggaagggcatggaaaagaggaagtgtggactggcagtctctgaaacccaagctctatccccgatagtagctgagctgagtccaattaataagaaacagggccactgctcctccacttttcaccaggaaaatgtctctgcagagtgccctgggcacgataggagtgattggatggcaaagcaaagactgtgtctgggattatcagggtctgtgtggctgggactaaagacaccaggagaatgatagatgtcttaagtggcttgcccaccttttcacattgctgctctgtaagaatttttaagtatattttcttcctccgagagagtcatatagttccatttccaaaatggctttctgatttttgaaacttaagtagggcagactttgctgtgcagtatggaaactaagcatggagcagaggacttgccacaggcctggctgtggcctgttctttattttttggagatggactcttgctctgtcgcccaggctggagtgcagtggcacgatcttggctcactgcaacctccacctcccgggttcaagtgattctcctgcctcaggctcccgagtagctgggattagaggtgcacatcaccacgcctggctaatttttgtgtttttaatagacacaggtttcacgacgttggccaggctggtctcaaactcctgacctcaagtgatctgcctgccctggcctcccaaaatgctgggattacaggcgtgagcccccacatcaggcctgtggcccgttcttcatcagctgctgaatggtcctcagagctgagaaagtcctgggttggttttggtgaggagttactggtgtggtgaggttctgtcagtctatcttcatcatggccttgagggaacctaatggtgagtgtttgtcctcatcatttggaagtagtggcctgtgccttaggaatttgaaatggtggatggctggtccctccctggatgggaaaatgccagggaaaagtcctgtcctgatggagctgtggtgggggttcctctctgagttcgaaagggcctttaggatcatctttctcatttgctcattgttgacacgaagaaacagacccttgtgagtaaatcttttctctgttgcatggccacaggactatactccttagtgaccaatcagcttgtagctgtgtgtttactacttgccaagaggcaaactaggtgactttaggcttttcaagcctggcctccaactgtatctctttcaggacaattgtggctaggtatgttctgttccctttggaggtagagagcatagaaaaatagggtcattatcaaggcactcggaacaaatggaacaatgtgagtttaagcagtgaacaatgagaacagcttgtactagaaagacggttgaaggcatgtgtcacaaggatatgtgtgcggggacaggaaggtacaaaaggttagttacccttaagcccagactcaagttaaatacctcgcagacatccacaggtgagcccttacataggatttcacatcctataaactgtgtgtgtataatgaaattagggtagtgatgggttgaaagaggccctcttgaagtcctcaccacttttctggcagtgccttttgagtattagcattgtcatgactaggccaaatgttggagaagctttattcctgaaggtttgggcaggactgtcttatttcccacactgccttatccatagaaggtggtcagcaagcatgtaattgaatcggacaatttggtaaatttgcgacacttacaaatatacaatgattgcacattgtacatcttatttttaagaggtttatctatgtcaatacgcatgcttatctcaggggtcttggtgaatgactggggtggggtgagggtctgaagtaagagtaggttgtaagggaaagccacatggaaaaggctgtggctggagacttggaagacatatgggagtgagctgcgcaagggtcggaggatggagcattttaggcagaggggagcagccagtgcaaagtccgaaagctgaaatgagctcagagtctttgcagatcagaaaggctggggagtggaacctggtgagcaaaggagtaagtggtaagcggtgaggtcaaagagaggtaggagcctggtcctgcagtagctttttttttttttttttttttttagacagagtctcactctgttgcccaggctgcgtgatctcagctcactgcaacctccacttcccgcttcaagcgattctcctgccttagcctcctgagtagctgggattacaggtgcgcaccaccacgcccggctaatttttgtatttttagtaaagacggggtttcaccatgttggtgaggctggtctcgaactcctgacctcatgatccacccacgttggcctcccaaatgcagtagcgtcttaaagaccatcttaaaggctggtaagagtctggactttattctaaggactagaagagaagccatttggttttatgcagggggatgacaggatgtgattttcactttaagaagacaactagtgctacagtatggagactagattgtagaggatgagagtggtgattgggaaggccgttcagaaggctgtcacagggagccaagggcagaaaactaggtggtggagcctggactgcagtggtagagacgtgggtggatttggggtatattttggatgatgggccaatggcacttgctgctgtagtgatgcaaaataagaaaggaattggggtttttggctttagcagctgggtggatcgcagtactgtttattgggacggggagggtccagggaggaacaggtggagcagttgggagtccactattttgggcatgtggaattcagaatgcctcctaatcattaaagtggagatgtcatggcagttggttttgagttagtctagagtgggaatagaaatttgggagtcattagtgtatgaatggtgtttaaatctctgagaccgatggagattgtatgaggagatgtgattgaggtgcgtagagtgtgaaggcctgcgcctgtggcatggtaatatttattgatctatcaccttaagacgaaagaacaagtagcaaaggagcccacaaaggaagggttggtgtggcaggagggaagaagaggattgcctccacgaagccaagataaatgttttaagaagggggcaaaatatatctgttggatttaataatatagacatcgttggtgatcgagattacaagtgtgaaatgtggatgcataagttttggcttaaagacaaagtttttcttccagttggagataacttctacaacattccgggttagtccttttcaaaagccaatttaaattgtcaggcggtttcttcagcctgcccgccccttccccacagggccacaaggtggcgccaatgagtcaaactccgggaacgcgaacagttggtgctttaggttggccatttccggtgcctttccaaaactgaaatgaagagttttctggaagattgatttgtcagggaaaaaatgtcccctttcctgaacaaaagagattatacagagtggctcatttcttgcagctaaaataatgtgaagaagcaggatgtgaaatatgcctgatttcaaaggctttaaaaaaataagaaaaatattaaaatgagaactctgagattcccagtaatggcagactgaatacacatttaaacttcaccaaaatgacactaaaacgattttgaaaaaagtcacaagcccacagacaagagcaacaggcaaggaggcaatagcagtacaattttgggaacggattgagagttaataagtactttaaatgactcaagctgattttgaaaccgactgtgggggaaaaaactgagaagccacctggtttacaccgcggaaccctccaaaaaggtcaagagttggcagcaccacgcccctctgggactgaggtagagctgaagagaagaataaatctagagtctgtttaagaattctagcttctgatcctctcctccctgctcacacaggggccacttccttctccactttggcagaactgggggtcgattctctggagggggcctctgtggagcaagagactctaggcacacttgagggtgttcagtgaaagattagtgatgttgagactcttctcctgcttgactctcagccttagatcttccatgcaaggaggaaaagagccttttctagaaaatctggacgggccaagagaagtgacccacagatactgatattggctggcgatggagaaccagggtggtccctcaatgaaaggacccagccgagtctcctatggagaatgtcaacaagccctctgtgcagagagctttcaatccatttccatggagtttccctcttggatgagtggacagacaagggtcaccagatatgtaagggaagatttgaatatgaatatcagaagtaaaacagagaagaaaaacctattgaatgaaacactgatggggaagaaaatttccagaaaaaaatgttaatattttccaaaagagaagatatcacagccataaaacagtaatttttaaaaattcagagaacaaagagctcttggaaattaaaaccataataggaataaaaaaattaatagaagagttagaagaaaaagttaagcaagtcacatatgaaaagaaaccaaaagagaattggagaaaaaaatatgaaaattagaggattagaccatctgaataacaggtgtgcaggcagagaaacagagaaatgggaagcatcaaagaagccattcaaggaaaaagaccagaagggaagaaataatgtatcactgattgtgtctgtgtgatgagattatgtatgacttctccccctcctttaaattttccaaattttgtgtaaaaatatattttaaaatgaggggataatgtgtggtttcagtgttaccaacattgccccaggacatctaactcgcaggtggtcctggtttccatagaatgaatatgtaaaaggagcatgttgaaaggggtaacctgaactcagtcatttaaccagagctagtgatatcaccagtaccagatcagactcattttcctgcctgcaggaaagtgcccttctagagggctaccctaagccacagggctacgtgcgtattttatttttattctcatttgttctttattactgaacacccattactctacatgaattccacttgggtcttgggtcgtcagccctggcctacaggaatatgaaccatcccatcctgcagttctctgtggggggtgagctgctcctgctgctttggtatcctcttccagccctgcatcctagctcccctcttccacaaagctttgaagctgaaaaacttggtgggcttgaagaggctttttggtagctgctgacctttggcgctggggctccttttctgccttttcccctcccgtagtttgtgagcccacagccttgccagggtcagacatgtgcatgagtctgagggtggggaagggatgctgtgctttcccgtagatgccactgtggtcttttttgggacaaatccagtgcagatgttgaaagccaaaccacaggatgcatctgtcatccaactcttccaaacattttgtcattgtagataaaggctgtttgattagtatttcatggatgacataactatagacctcttaatgactgttattaatttgttatatttggatgacagatattgtgtttctattgtttagcctttttattatagaaaaattcaaacatatcacaaaatagaatgataacaataaacccacatgtatcccagccgtcccgcgcgtatcccagccgtcccgcgcatatcccagccagcatcagcagttgcccactcatgactcatctggttctgtctctctgtcacgctgctcccaactcccaccctgtggtttaattttacacaaatcctggaatcatattatttcatacagaaacgtttagtacatatctctaaaatacaagcattcttttttttttttttttaaaaaggactacctaattatgtttaaatatccagttagtgttcaaatttccccagtttgtctcagacacagtttctgtttctttttccaaattgagatccaaacaggatctgtacattgattggtatgtttcttaaatattaaaaaatccttctttgtccatttatttttccttgtaatttatttgttaaagaatcatttgtcttctcttcattggaaaagagagatagtaaagttccaggttattaggaccacttgaaatcacaacaaaatgttctaatgttttaaaaaataagtgtccgagaggaatttattccatgtctgtaattaaaagtcatcttgtgagtgtgaggccctccttgggcaccctatgtatgattttgccttccccaaacccttggtacttcccttccattcctgttttatttttcctcctaatgcctagagttacctactatatattttacttgcttcttgtctgcctctcctctagaatgtaagctccacatggttttgtgatttgttctctgctgtatccccgtccctggctagatgaatgaagatgtatgaaggcagggcagaagcagggtggggaatgggtgtgtagaggagggcaggtggcgcgaggcatgaggagaaaagtctcactgtgcccttcgcctttttgatgtgtcatatcaatgggatacagatccctataaagttctgtgagaagttcagatgatgactctcttctgcttgtcactcaatgatggaggggcctctctgcagacgccggcttggtctcttggcctctttaccccactgccggctcgggcctcatctcacagccataggctggtttgaccaattttatcaatagagactgggctgggggcccatcctctcagaacatcaccaacagcatgcaaaggtgtcccaatgagggtggtggtagtcagcagtttgtcttgattcagaacacgttgcccaaccttcagcgtggttggattttgggccagctgcaaagccacatgctggaaggcagcaggaacagcctgaatgagccactgctgtgccatgagccaggtgtggccttgaacagggcccgccaccgtcccttagtctcctcatctgtagaatagggaagatgcgcgttcactctgcagggttgctgggagccttttgtgctgtccagtgatgcagggctgttagggcggatcctccagtcagcctgcgccagagggcagcattctggccacgctggataacactgagagacagagaccctgcctctcctgtgggccagggcaggcccaggccaactggagagagggatatggctggatctgcaggccccctcgtctgttttgggcatggggagaggagatgcttttgcactgttgtagctgagtggggttgatgcatctcctccccacccctcgtagtcccaggggtcttgcaaccccagcagtgcccccaggagcccccacgctgtgctggcattgttccagggcattgtcttaacagctttagttaggaggctcttgccacactgacagagtgtgtgtcactgggtcaactcagactccttcctagaagcgctagtctggatatgtggtttttttttccagtaagatgctaggcatcctgtgaagggaagtgcacaccagtgataagcatcccacatggcccctgccctgctgttccattgcaccttggggaaccacatttgcacgtccatggagaagaggatttttactactgctgtatcagaccaatagatttagattattttctgggctgtatgaagtccacaaaggactcttttttactttatagatttatgtcatccagtatggtagccactagccatatgtggctatttaagtttaaattcaaatgagtaacattgaataaaaatgtaaatccagttccccagtcctgctagctttgtttcatgtgctcagtaggcacgtggaggcagtggctcctgggttagtgtagattataaaacgtttccattatagcagaaagttccattgaacagcactgtaaatattcctactcaaagatgaatgagtgtggggagggaatgtcagggcacttaggagacagctgagtggcaattgacgaaaaattattgcaattttaacctcattttcatttcatgataaaacacttcctaaagcaaacttttcagaggaagacttgaggtttccggtattgacacattccattagaaggttgaacccacaacactctcaactcttcagttgcctgtcacctttagcacaggcagggatatggggtgcccgtgcttagccaaggagtgactccttcctgccttgactcctcacgctgctggaaggtcccctgtggggaaagtgcatgattagaaactttcatagcaatttatttcttttgagttagtggaaaagaaaggtctcatcactcttggtttgccacttgtgattctattaaaggaagaagaaagaaactcgttgatgaaacagacacctttctagaaggtctactgcaagcttttctgttttgcttggtgggttcatagcagcagagcttggactaagtgaggggagccccaggcacagatttacagggcattcactgtcaggtgccaaccttgtactcacatgggccaaagagggagtgtctccttacattttgcaccccgggtgcctagcttgcctcactcctgtcccatccagggctggctctcttggggcccattgagccttcactctggtgggctggctgcatggttctaggaattctggacttgcacaggtatagcccctttagcacatacaggcgcatactgtgtctgagcctctgtcacactgaacctctcaggtagggagtgcatctctctgctctttctatacctggaccagagtagaggactagtaagtggctaatgaatgaatcattgaacagatcagtccactaggggtccagtcagtgaattaaagagtgaagagttctcttagactttaagatttcagagaacatccagtgttgtagcctgcaaagctccgcatttctgcacagccgggctctggctgcacacagtgacgcggagagtccgcccagcagcgtgacaatggatgggtgctgtttcctccacttgcctttccctagaatttctttcctttcagcgtcaggttttagttactttactagaaactccagcatcaggagtggttctcctctcttccctcctttctcctgcttcctccagagtttctgccatggccagactgtcctaggagcacatggctgggcctggggtaggccttgatttggggaggcgtgggggaaaagaagcaattgcctgggggtgggaggcccctttgtggactcagtgttacatgcttctctcctctgcctcccacagagtgtattgaagaagagggaccaagttcaagcagagtatgaagccaaactggaagctgtggctctgcggaaggaagaccgccccaaggtcagggaagccacctgggaagggctgcaaagctgtagtctccctgctggtgctaagtaaattctcatctctagatctgtatgactaagagtggtcagtgccggctgggctacgttgatgatgttgtcctttttcactcccttttctgtcctatttctgcgagttcctagtgttcacttgggattgagttttccactgtttcctgggcctaatttttggttttttaaagacttaacagctctgccattcatcggcagttccttgctccataaaatggcattgcagagagaaggaaagaatagcctaaatcagtgctttcaaagtgtggttcataggcccacaaactatacaatccatgatgaggaaagtatagaagcacttggaaacttctataggaatttgatgttgctgcagaaccagttgaacacattgtgttgaacactcaaggcgagcgtgttaaactcgcgtgaggagttgcatgtggagcaagctgcgtgctggttctgcacggcaggactacagcttggtcgaattgggggaaaaaagccaacaaaaagtggccctttactccacagagttcgagcagcactaatcttgcttgtctaggatgccttctggctccagtgtttgtaactgctcggtaggttcacctcgcctgctgcctagacagagctgatttatcaggacaagggaattgtaatggagaaagagtaattcgtgcagaactagcttactggacactggagttttactgttattcaaatcattctccctgagcatttggggatcagagtttttaaagataatttggtgggtaggggcttaggaagtgaggagtgctgattggtcaggtaggagatggaatcatagcgggtggaagtgaggttttcttgctgtgtcttctgctcctgggtgggattgcagaactggttgagccagattaccacctttttacatttgtgggctaaatgcagacttttaaaatatatacaaacaaatcatcctatgtcatccctttaaatccctttgttgaaaggaaacttttaaaatatacacaaataaatcatcctatgtcatccctttaagtgagactgagacatggctcagcagatggcaccatgttccagaagatcacaggccagctcggaactcgtcagtggggctggccataggcaggcctcctcttactggggaggttgaggtgggaggatcccttgaggccaggagttagaggctgcagtgtgttatgattgcgcctgtgaatggccactgcaccccagcctgggcagcatagggagaccctatcttaaaaaaaaaaggttttggattttggggcattttgggttttcagactggggacgcccaacctgtgtaacaatgatttacaaggtatttatgttgtattaggtattataagtaatctagagatgatttaaagtatacaggaggctgtgcatcagttatatgtaaacactacatgattttatgtaagggacttgaacattcacagattttgatatctcagaagtcctggaactgatccccaccccaccccaccagatagcgaggcgacaactgtgtgtatgtatatgtgcatgtatgtgtaaaatttcattgattccataccacaaccatgaggtttaggtaccattattatccccatttgagagatgagcaaaccaaggcccactgtcacacaactagcactggtagagctaggatggtaccctgcagtttgactttagaattttgctacctaccattctatcactctgtctctttttggtttgtaagtggaaggtgtatttgttttcaaagagaggggtaagagtgaggaacgttagtaagataatagcagggacttgcatttcagggaaatggtttgacatcagagctgctggggatttcctcctttgccatggttcctgcagctgccgccatgccaagacatacctggaaaggaaccagctttggaatttgaaacccacacctcagaaatgacacaccttggctttgtgtagtgtctttaatgttaattgcatcacaggatcactgcagtggtcatctgaggcccgggggaaggcattgttctttccccgtttcatgggtgaggaaatgaggcacaaaggagctggacaaattgcccagcctctttgatgccgagtggctctccatcctgtgcatgtttgttgtgttgattccagcaggatcacccctagtgatctacaccagagcgtaaaggctgcatgtatctatggaaaggcagatgatgaggattggaactgtagtcactggcccagcgtatgcagctggcaccctccctctggttcctcctgccacaggctgtcagccttcttccatcctgtgtgtctgtcacaagggaggcgacaacagaaatgcagagccatgtgcacacagctgccctctgcctgcctatggccggccccactgacgagttctgagctggcctgtgatcttctggaacatggtgccatctactgaagccatgtctcagtctcatttaaagggatgacataggatgatttatttgtgtatatttttaaagtttcctttcaacaaagggatttaaagggatgacataggatgatttatttgtatatattttaaaagtttgcatttagccagcaaatgtaaagatagaagtcattcacagaaaacaaataactgcatgatttgacttatatgtggaatctaacaaagttgaagtcgtagaaacagagagtagaacggtggttgcccggactcaggatggggaaatcgtggtcaaaaggtacaaactttcagttacaaggtgaacaaaatcctggggcttccatgcaaaatgtgggtggtgatggatgtgttcattaattcgattgtgatcgtcactacacagtgtgtacatgtatcaaatcatcacgtcatatgcctgaaatgtatgtaattttatgtgtcagttaaatatttaaggaaaaatagaagtcactttttctggctagggaaggaaggagaaccaacaagttctgccactggcctagtttggaaaccgaggatcctgcattttaaagacgtcatgtatgtagttctgtaaatagcatctgtacaagctcagcactgaatacgagctttctcagaggctgatgctgtcatttaatatgttcagccctatacaggacacattcttttccaaagccaggagctgaaggtttggaataataggccgagttaagtcttaaccctgcctggcttgctggctgctggaagcacacaccaggcttggagcagtctcgagcagagggagacgctggttttgtgccctcagacccccacagctgcctgccagggctcctggcctcacattcctgcgggtctgggtgattcctgtccactccccgtgctgtggaaatctttggctgctgctgttgtccgccttcctggacactacttacccacatggctcatcctctcggccacaggaattcttaccagaggctaagggtttgccccagtccgtgaaaatgactagtccgtcctgaacacacatctgcgatctcttagcacactgtggctgggccatcttcaccttccctcttcctggtgggatgttgaaccatgccacattcactttgctgcttctttagcaattgtgatttttaaagacaaaatagactgtcctggtggtgtgccagtgaatgtaatgtaacagtggcagcagcagaaatcctttgctgcctttgggtctggggcagcagctgcgttggtgggcagaggagggtgcagttggcagcctgtccaagtccagcacggttggagcacaggatttagaatgggatggtcctgggttcaaaccccagctgcgccctagcttgcactgatccgctcctcagcctttgtgggcctcagttgcctcccacacatgagtgttgtgatgccataaagtgctcggcgtagtgtctgacgtagtgacagatgctccgttggaggagtctcccgtgtccacactggctgcagtaggaatgtgggcggagaactttgttttctgggtttgctgtcacatattttaagaagtcccttttctgaccacagtgttttagacattgtttcctatgtcctcaagcttcccctgcctccctagccctccacacacctgtcctccccgacagcccatcaggaggtttggtggatgctgaggaaatgagcaacttaaggttttgctgtgctttgcctgatgtggttgtgagctcacgaagccagagctgctgttgatgagatttttttttttaaaaagccagggaattcggaagtgggttagggctgattctatcccagggcctcggctaggtcttttgggaactgatggtgggagcgaggtagctcaggggactgtctcaggagtgccggggaggagaggtcccctggtatgggcatggtcagcagaagatccgagggagtctgggggcttacctcgttatcaggtgaaaccttgaaaaacttgcgctggataaggagggaaagttgatttttgtggagtcatggagtggcatcaaaatctgatcacttttttgtaacccaggggaaggaagtggcctcatgtctccacaaccttccctgtgaatttcaacgtggggtgatcctcttaggggagtcctaggacgtcttgtggggaaagagcacgtgctgagggcagaggatgcggaggcctctggagctggggaagaatggtggtgtcctagaatgcaaagttttgcattgtggttgggctgaggctggagaaagctcagcagacactgaggtggtgattcccaggcagatggagctttggattctggagacttggccttctccatgttaattgtgaggttggagaagcgacatgcacttacttagcaggggctggctgccttctcctgggcctgttgggctgcagcctggtgtacaccttagaatctaacccgccatggaaggtggggggcatcagagctcttacagaagataaggagaagctgaggaattagattttaaatggcaccgggagcatccgcaccttcgaatgacagtgagggtaacagagagggagctcttgccttttcctgtcttctgcgttggactcttttcagtgctaatacacttggtataactagctccaaaaagaacaaagaagggatgccagggagaaggcttcacagaattcctagttatcttcaaaaagtaaataaaaaaagcagggtgctgttttaggccctgacccacgggtagcctcatcctgggtgggtgccagatgaagaagtttaaatgggtggtgtcggagtgcagatgaggagagatgggccgtgtggaggggacctggggtgtcggtgttggggggctggcctgtggtgtgtgtggggggtgggtgtgtggtgtgtgtatggggagggcacgtggcatgtagggagggcgtgtggcgtgtagggagggcgtgtggtgtgtgtggggtatgtagtgtgtgggggtgggtgtggtgttttgggggagcatgggtgtggaggggagtggggcattggtgtgggaagtgtggaggtgtgtcgtgtggaggtgactgggatggaaaggtgcacagagctgttccccctctggttgagagaagagcagagggaaagtggaaattgggctctctggacaaacctcttgaaggctgtagaccttggacagctcttagaaccaccgggatagtgaatgttctagaatgggaaagacgtggtgggtagtgaagtgagaatcccaattgtaaactgccagcagggagacttctacatacagagctaatgcagaccggagagtggggcctcgtgtctgttgtttccagacccttctggcaagtgaggaccctcaccatggggcagaagaccaggtgcctccagccagagcaggcagaactcccccatcccctcagctgacttaagtcccaccgcagccaccctctgccagtgcggtggtttccatgtgacagatgggggcccggggtcaggggaagcgtggaacttaagtgccaaagtcaacaaatggtggagccggtatggagtccaagtgcatctggctccaaaactggtgcctttccccagggcgcgggccccagcagctgtgctccctgagggggcgccctgcctttcccgaggcaggcacggagagtgcgtgtggccttccctggggcttcactctcgtgtcattgcgcaggcaagctcgaggatctcttgctgtcagcctctctgctcctcatctcatgccctcacctctccctccctcactccccactgaccattctctgaagtttgtttttatctataattaaaaaagcattcattcagagagccactgactttctgtttgcccaattccatggcctcttttcaaacttgaccctgtatcagtgttttcttacctgttttcacctcacagctcaaatagacactgaaaacgcagttgctggaagctggaggtgaccagcctgggggctctggcttcccagagggcagaggaccaatctctctgccactcacacattgccagttagggagccctgtcccctgctcactcagcagcgtgtggctgtcactggtcctggagcctgtcctacagcagccacgagctcccctttcctccacactttgggattatatctgtcttgtgtagtctttggggatcttcctaacctactatcatcatgagagcagataatgtgacatctccaacccagctccaagaaggagacttaagttgagatttctgttctagggcctggaaatgcgtggcacatggaaggagctcagtaacgcatgcatgcatccatccatccatccatccatccatccatccatccatccatccatctatctatttatttattgctctgttgccaggctggagtgcagtggctcaatctcggctcactgagtaatgcgtttttaaatgaatgttgagtgaatttaagttactgtcccgttccccagcacacagaaatgcacagtcccatccacgtgactcttctgtcattgcactaacaacctatattctgtaatggaaattctcatgagagattgggaaccaaggtgaaaaatgcaattttgtcacctctgtataaatttttatcttttgaggtcttatctggtgatatttttccttggtgtcatgataagcaacacccaaccattagcagtgctgtgccatgtcaacatccttcagacgcatggtagcacaaccgtaacaatacctcagtcacgaaaattaaaacattgagataagaggaaatgctgagggtggtggcccacacctgttattatctcagcactctgggaggccaagacaggaagatcgcctgagctcaggagttcgagaccagcctgggcaaggtagcaagacctcgcctctactccagataaaaatattagctgggtgtgatggtgtgcatctgtagttacagctactcgggaggctgaggcaggaggatcgcttgaacttgggagattgaggctacagtgagctgtgattgtgccactgcactccagcctgggcaacagagcaagacctgtctcaaaaataaataaaaaataaaagtaaaaagaatgcttagtgttactggtcagtgaattgatagttacaaagacactatccaaaaaatcaaaggtggaagaatacatgcctgagcatgagttgccagcgctccccttcttcaagttggggaacttcacaagctggtcacagacagctcaccccagttcctctttttaattcttccatcctcttctaactcctaccacccctgggcttctctggctctgttctctctgattcaccacctcctctttctgtgcccgcctttctgccttcccgagtgacttttgctgagtcctttattaaccctacacatgctggcttctctgtgagttcaaaccttgggccctgcctccctcagccccacctttccctccatatatttaaacaagattatactgtggtaaaatatacagaatataaaatttgccatcttaaccatttaaaagtgtacagcttagtcgtgttaagcacatttacattgttgtgcaatcgatatctggaactcttttcatcttgcagaactgaaactctgacccattaaacaactctccattccccctcctgccggcctctagaaacccctgttctactttctgtctctatgactttgaccattctagatacctcgtatctagaataatataatatttatcctgtgactggcttatttcactcagtgtaatgtccttggtttatccatgttgtaatgtgttagaattcccttcctttttgaggctgaataatatcccatatatatgggacatacacacacatacatacatacacatacatatacataccacattttgtttatccattcatcagtggacatctgtgttgctttcatctttgggctactgtgaataatgctgctataaacatgtgtatacaagtatctctgagaccctgctttcaatttctttggatatgtactcagaagtggaatccagcaggatcatatagtagttctattttaaaatttttgaggaatctccatactgttttccatagcagctatactgttttacaatccaccaacaatgtacaagggttctagtttccctatgttcttaccaacgcttatctatttttttgagacagagtctttctctgtcgcccaggctagagtgcagtggcgtgatcttggctcactgcaatctccgcctcccggagaccagccaggctggtctcgaactcctgacctcaggtgatccacttgccttggcctcctgaagtgctgggattacaggtgtgagccgctgcacctggcctattttctgtttttgttattttttttaatagtagccatcctgatgagtgtgaggtgctatctcactgtggctttgattagcatttcactagtgattatgatgttgagcatcttttcatgtccttgttgactgtttatcttctttatttttatttttttgagatggagtctcgctctgtcgccaggctggagtgcagtggcgtgatctcggctcactgcaacctccacctccctggatcaagcaattctcctgcctcagcctcctaagtagttgagactacaggagcacaccaccatgcccagctaattttattgtattttcagtacagacagggtttcaccgtgttggccagggtggtctcgatctcttgaccttgtgatctgcccgcctcaggctcccaaagtgctgggattacaggcgtgagccactgcgcccagctgactgtttatcttctttggagatacgtttaagtcctttgctcatttttaaatttggttgtgtattcttttccataagcctttataaaagagctgtgtttggttttcttgttatctcaccccgctttgtggagggaggcatcactcttcccctggctgcaactccctcctttctgtgatctgtggacctgtccttcattctgagcctttggtggcattagtgccaccctagtcatccagactagaaacttcaggcttctctcggactccctgtattttatttctcatgggcagccagttgccaaatctgtcagttctgtctccaccaggttggtttactccatcctctcccttctggtgttagagccacaaccccagttccaggatgcccagtgcaatctcatgctaatatgtagtttggagatgattcatctctggtgtctaatgaaatctcagggtggagtagcattggcaaagggtggcataatgtttgggagaacatataataatatagtttgtatttggaagatgaaaacctgttttataacacatggaataaagcttgaggagctgtgcaagggatagattatcttttgtgaacagcaaattataatattgatactgatatgagctaacaaatgtttattgagcacttactatatgccaggcacaagtgtgtcacaggtgtgcaatgactctctggaaccagtgttgcaggggtaagaagaatttaccaagacaattataggtaaagaaaaacagatttattagaaaaagtaggaaaatacattgcaagagtgcaacaggcagatcagcaggaagggagctgactgcccagaaacaaaggcttgctggggatttcatagaatggtgctcgtgctgtgtactgaagagggcttcatgcagtgctgataactccaaggtcgcagtgagcaaacttgcatttttctattaactgagggtctggtgatagctgggtgcaggaagattgtgttattaatatttgtgcaggaaggctatgtgtcctggaccatgaagaaaagcagaagtatagcttaatctgccttctctttttgctttcccttggtcctgtcagcccaactcccccttcctaattaggacgctgtaaagcacttaacacatattagcctgtctggcctcatgacagcctagtgaggcggaggatattattagccagacagagaagctgaggccaggtcccaggccacacacctggtaagtggcaggtggggtgagcaagctaagctctggaagtttggttctagagctgtccactgcagctggaggaagtgtggggctttttctattctccaagagtgggcatgagttaactgggcctcaggaaagcaggactttgggacgagcctcaggttcctcatcccctgccaccctctgccagtcttgcgagctgcagttccctctccgtgccgctgtgggccctgtggcctgtgcacaattcctgcggtgggtcctggtgtcttctctcctctgtcccttgcgtgtaccgccactctggagtgccttccaagtggtcaaacatctcacatctgtcatctttaaagagccgcctcagtgctgtttcctccatgaggcccgatcttcccaggttggccgccccctccatcctcctcagcgtgcttatcacgggggctgcaggggaagcgacaacacttacgatatcttgcctcagtgtctaggcatgttcctgtttcttcccaactagactgtaggttacgggagacaagatttgtctgttgagacccaagcacttttgtattcctcagtgccaagcacagaatgtgttgtgaaactgagaagccaaatatttcccagaccgaggctcaggcagtcctaaaacccacagccgtggtttagaccctgatttttctgggtcagtcagagttcccatctccagaacacacctgggaatctttaaacctgggaatctttcctctgtgaacagtcctgattcagagaccctggctgccctcctctccacgtgtcctggtgaggttctctttccagggctttccattttctcctcacagcagaagtttcgttaagcaaacaggaagttgctcataggcaccctcaccccaatgcaagtgtgagcagtggccaggagacgggtaagggaactggcctgtgcctgtggggaggtgaggccagccagagacactggctcgctgggcatctttccattgaggctgattcctggagtgactctggagaggcaagactgggatactctggtttttatttcagtttttcctgaggtaaccaatagtaatgggtggtcttgggaggaggcaaaagagacttaaatcatggcatcagaagaaaaagtcagtctctgacctggtatggtggctcaaacctgtaattccagtgctttgggggaccgaggtgggaggatcactggaggccaggagttcgagaccagcctggacaacatagcgccaccacatcctacttattgtagagatgggggtcttactatgttgcccaggctggtctcaaattcctgacctccagtgatcttctgccttggcctcccaaagtgctgggaggcatgaaccactgcactcagcccagtattttttttttccctcttccagaagcttatgtgctttgaagaaggcctctttccccatcttaacagaaaaattccttgcttttaaatttccagagtgtctagttatctctctctccagctcatcctggtttcacccatgtctagttcccgtgtcaggcacattcaaattcacttgccttggccatgtctcttccctgactcctgtgttctacaaccatctccacgtggtctgtggagaagatggctgagtaccctgaaggtgtccagctccctcaggcctgtctttctcattggcatcattctgggtcagctccttgtccacgaggcttgggtataaacctcctcgattggtggaagtggactcccaggggtgagccatggcttggagacagtttggttcatgggccccagcacaccaaacataaaaggcctcacttgtggttgggatacatttggcaggtcgggggtttgacctggctttgggcctgtcggctccctggccaccatcagggctcagtgaagtgcttgagttaggagagagaagccagctttgggaagcgctgcagccacaaagcccaaactccagctgcacaggatggtgaaattcaccaaagcaaagtgaaagttgtgaaacttcaagtgacatagttcccttttgagaaagtcttctaaacctctttaagaaaaacttgaaatagcctgctgtatatttcttctttgaatttcaaatttttttgacatgcataagtaactttcctcctgttttctcagacttctctaactctccatttaaaagtatctgctattgggaaaagcataaacaagcctccagtttatttatgatgtggggttcagaggaggcagctggccagtagttgtcttattgcaattctctgattaatgaggaaaggcatcatcaaatgtcacagcaatggaatagttcatgtgatctgggagaacctacctcttctctagttccaatatgggacacaggagaatagcagggcaatacaaatgctgtatatttgcaaagtctgcacacactttcaagtgtggatgagtaaatcctaaaaggaaccaaagacatatgagtctgaattgcaatgtttcttcttcctgtgtgtaaatgggggtgtttcccccacgagtctctgttgtgtttggatgggtttgaagatctgggttaggagagccccttttcagagctcctccttagacctgaaaacccaaggttttgctttcaaataaatgcctccagaggagggagcgtgttgatagcattttaatgtagggctttggcctttgacaaatgtgtgctcagaggagctcaaggcaagagatgccagttttgtgtgcagggcacccatgtgtgcctcccttttccaggtaccggcggacgtcgagaaatgtcaggatcggatggagtgtttcaatgctgacctgaaagctgacatggagaggtggcagaacaacaagaggcaggacttccggcagctactcatggggatggctgacaagaacatccagtattatgagaaggtaatgagtgtgcccaacaagactggtttctaatggccagagcctttcacatgggcctaccagaaatccacaagctgggaatcctgctagtctcatctccttcccttattttagctgcttagtcttggctcccgcttcatgcccttgcccaaccatgtggctgcagtgctgggtttggcagcagagggggtgctcacaggggtttcccttgcacatgctgctggggaagcagcccattggtcttccatgctttctgggcctggcactggttgcttcccagagccagtcagaccttcagcacagtgatgctgccaccgaatggaggctttggggttactttactctgtgttggggttctgtacacagggtcccttcagtttggttgtgcagtgaacccctttggtcatctggtgaagcctatagacccctcaccaaaatactgtgcatttgttttttaaatagacttcaaaatattgattttaaatacgtaaaataaagggatgtaggattacaaaggaaagcaattctattaaaaacttttactcatggatccccttgaccaggttaagcagcgcacgcacatgcgcgtgcacacacacacacacccacacaccccactaccaccaccacaccccacacacacactacacacacaccacacccccccacactacacacacaccacacatacaccacacaccccccatactacatgcacaccacacaccccctacacatacaccccacatacacaccccacacacaacccccccacacacgacacccacacaccacacccacatacctcacacaaccctcacacacaacccccacacacaccatacacacaccacacacacatagagatgactcttatcaggctacagcccagtcccctcaatcaaggtttgcttgattcgtatgtccagcaaaccagtgcgaggccaggtgcagtggctcacgcccgtaatcccagcacttgaagagtccgaggtgggaggatcacttgagcccagctcaagaccagcctaggcaatgtagtgggactgtcgttacaaaagatacaaaatgagccaggtgtggtggcgtgtgcctatagttccagctactcgggaggctgtggcaggaggatggcttgagccaggagttcaaggctacagtgagtcatgattgtgcactactgtactccaacctgggtaacagagttttttgatcctgtcacgccatatatatatatatatatatatatatatatatatatatgtatgtatgtatgcacacacacacacacgtatacacacatatatatacacacatatacatacatacatacacacatgagtgagtgtgtgtgtgtgtgtatgtatgtatgtatgtatatatatatatatattgcgatagggtcaaaaactctgttacccaggttggagtgcagtagtgcagtctgttacccagagttcctttcttctgtaactcccacaccttccctctgctgttcagcggccttcctactactacaaaaccaactatgtcaaatgtctctgttgctccctttggtaattaatcccagcgttcctaaagtcctggtcccaggaggacccaaccctggtcttaagtacgtgtttatctgtcttcccactatatcacaggcagggccactgtcttggggcctggtattgcttctatacatatttaacaaatgctttttgtgcacttgctgtgtgcaaggggcagtgtgtaccaaattgataaacagcaggattcctgccctgtggagggtatgtgttcatcaaaggagcccacagcttcagagtgagataaggaaaagaacgggaaactgggggagaaaataccagggggcataatgcagactaagggtgggaggggcaagtggagtggtcaggaaaggccagtctgaggaaatgacatttcatccgagtctcagagacagaggcttggaaaacatatattccaggtataggagacaacatacgcaaagtccctggggcaggaaagagtttggtacatttgaggaccaaatagaaaactggtatggccttggtttatcatggctgacatacaaagtccattgcagatctgaagtgatggcctagggagagagcaggacctggaatgccacagaccccagatcatcttccgtatataaggtgggcttcagagtttagcttcctctctaacctcagagtcaccaaggaggaatcaggaagcaatttcaccactcttctttctggcttgacctaggatgcctctctcctcctccctcctcagaacttctcccacctcctgggaattcctcccacctcctcagaactcctcccacatcctcagaactcctcctgcctcctcagaactcctcctacctcctcagaattcctccccctcctcagaactccccccattagaattcctcccacctcctcagaactcctcccacctcctcagaactcctcccacctcctcagaactcctcctccctcctcagaattcctcctgcctcctcagaactcctcccacctcctcagaattcctcctccctcctcagaactcctcctccttcctcagaattccttctccctcctcagaactcctcccccctcctcagaattcctcccacctcctcagaattctttctccctcctcagaactattcccacctcctcagaattccttctccctcctcagaactcctcccacctcctcagaactccccaccccctcggaactcctcctacctcaggattccttctcaggattcctcctccctcctcacaactcctgcctcctcaggattcctcctccctcctcagaactcctgcctcctcaggatttttcctccctcctcagaactcctgcctcctcaggattcctcctccctcctcagaactcctcccacctcctcagaattcctcctccctcctcagaactcttcccacctcctcagaattcctcctccctcctcagaactcttcccacctcctcagaattcctcctccctcctcagaactcctcctccttcctcagaactcctcctccatcctcagaactcctcccacctcagtattcctcctccctcctcagaactcctcctccttcctcagaactcctcccacctcctcagaattcctccttcctcctcagaactcctttcacttcctcagaattcctcctggctcctcaggattcctcttcagagctcctcccacctcctcagaactcctcccgcctcctcagaactcctttcaccttctcacaatttctcccacctcttcagaactcccgctcctcacacctctcccaccccctcagaactcctccccacctcttcagaacctctccccacctcccccaaacccctcctgccttctcagaacccctctccacttccccaaaactcctcccacctcctcagaactcctccctaaatgactcagtacaaagtcctcctccacccctggggctgctactgagaagccttatgtgattaacttgccctctttatgcaagagactttccaaagggcgaatcatttctgctctcagaggacaatgccagagtgttctgagttcttggcctttcacaaggatctgggatgaaaagaggttggtgtagtggagagaacatcagcgtgggaaccatgagctctaccatggacaagctgtgtgtctgggccagttatttaacctgagtcttgtcttccccatccatgaaatcagtgtgtatgtgtcgagtaataattctccttcatagaggagctgtgaggactggtgataactaatgtaaagtatgtcaccatgtttggacataataaaactcaataaacactggcttccctcttccatattcccttttgagagattcaggtgtggcccaaacaagcaaacttgaggttggtgaggaagagtgggctttccacccgctccaagtcaggtgcctggcctgctccaactatgatttccatcctgcataagcgccacccacacctggagcagtgtctccatccctgccgagattctagggactcttcaggggtttcctgcttgggcttttttctgcttttttgaaaggaaaagaacttcctccagtaaatccatttccattcactggatctgagctttacagactaacatgaatgcatttaagccttgcagagatattgctgtctttcataaagatggggtgacgcattcaaaacaaacacctgttacctccccgtttgtaatagttatggatgacacatgcaggcatcattagacaaaggtaacccagcaggatcgacaacgaaagggtaggtcagagcagaattgaagctgacccgaaatcggaaactcaaagctgatactgtgtgtgtatgttgtcgttccagtgcctcatggcgtgggagtcgattattccactactgcaggagaaacaagaggccaagtaaagttctttcttgggacggagactcttctacctacacagggcctggcaccctataccggaatgtccctgcagtgccagagacgcagtgctgggaaaacaaccacagaaacatctctcctttgtgtatttttccctcccccacctttcaccccacagtggttttcaattagtatttattccatggtggagtctgtgaggctagaatatctctcagcaagagcagcatacctccatgttatgaaggcatctgttcagtgaagcactacgaaaatttgaaaccaagggacaagacaacttgcagctgacgctctgacatttcatgacagtttcctctttagggacagctgagttgccagttgtgggagagaacccggggcctgcttttcaaggatgaggaggaggcaggaacagaaggcagctgctgctttctgtggaaacctggcccctctggaattggcctctgtgggcattgacttgtcttggcctaggaggcattggtgcctccctggcaagtccttaacgtacagtacctgtagctgtgagtgtggcctgctgcctgcttgtgatgagtgataccgtcttactgtttctgtttcacatagggacatttaaatcaatgtcaatgtgcgtccatgcttgagtgagcaagccagcgtccttgtcctcctgcaatgcctttgggaagctcaggggaatgctccccaagcttgtttctgacactagaatgcaacagattggaaactttttgtgtaaaatgaaaaaaacaaagtgctgttttttttttttttctgtgaaggtcttcagtgttttgcttgttcactgtcatcagagcagggattagacctgttagggaatatctattgtcttgaagtcagagtagctccccattgttgagatcagtgggcatataccaagctccacccccagtgtcagctttgtgcaatttgcctttacctcaccaaaaatacctactttaatatttcctcctgtgtcctctgaatgtctgggcgagcttttggtgagagggctggtatgtcatgttgttatgatacagtcgaaatttgtcaatgcagtgtgaatgttctacataaagtgctttaacccttaacatttcctggtcaggaaggaaaatcagtacctggacgggcctcgaaaatgacaaatgcaacagcgagccctttgtgtccagctaagctaaagtctcctcagtgtgcagccagattcctggggactgctgagtgtggttacaggctgcatttcagacaatgaccaggtttacttttcagatcacaaagcaaacagtcaccaaggatctgtcttccaactcttttttttttctgctgaaatgaagctacatgtcatgtttgtgttctttcatctgtggctcatccctgtaaaactacgaatctgagcctcaaataagcagtagtttttttgttgtttatttttaatgaaacagctgtgttaaggcgctgcttcagatgcaagttcacctggaaatactggtcagcgggcagcacgtcaaggtcacttaagcccacttttaactgcaggtcatcctcgcatcagccaaggctgtggtgctgttgatgccgcagttggacagcataggacggcttggttctgtttcattgtgtttgacaatgttgcagtttaaatgataatgtttaaatcaattggtacttgcctgtagtgttaaaccctatttgtgccattctcaagtcctttgatgtgaattttcagtttggtacagttagaaatgactcattgatgcggacaggtaagaacaacccatgtacccccgagtgattgcatgctttattctacctctaagccatcgtgttggcgtgggtatggacgcctgggtctgacctgacactgtgctgggagaatcaggatgtgtgtctaatggcgagctgacagccctctgctgatatttggcagaaggcaccagaccagcccagcagcaaatgctcatctttgggaacataggaagctttaccttggggaaggtatgctttacaaatgtccagtgtaatgaatgtttggaaaaaactggagttacaggaaaatgaaatctgactatctgctagttgccaaaacccagaaacattcctgtgtaatggttagttgggaaagaaggcagcacttgaaaaaatttaccaggttcctcactgggagatgtgggaaggggcgtgggacgcacgcggtcactccctctcctagtgagaggcagatggctggctctgaagggaggcaggcaccgtgggatttgggcttgctctgcttggtccccatgtgatgccctgtgctgtaagatatcagaaagacctggaacaaggcaaactttatgtcttcctggcatgttattgataacagagccaggaagtccagtgtacattacagattttctgggagaaatagtccttccagagaaaggattccttcccagcctccaggctggtgtctcatgaggtgaggaggctggcccagaaggaaggggacgttaggtggtgaagcaggctcccctgggcctctgagggccagcagtcccaaccatttgcctcttcgttttgaccaagcacaaaagagatattccctagaagtgtcacacggaggcttctgtgccaaagactgccttgtagaggtctcatcacctcacacttcttgacttcacaaaattgtggccctgagatcagtactcctctcttaagtatttattattattattatttactttacctcaagcagacagacataggttttgaggcttgaatacatggcagtggaatacaaggccctccctagcagccgccccaggcctggaaagtgggagatttcattcgcccgggttaaaaatccagaggaagacagaagagaggagtcctaggaactgagcagattttagagacgcaaatgatgtttaagagagccttgtgatttgtagcaagcatgggcactgctttttcttactaatgtggtagatctacacgaacattctaggctgttctgctcagagcgaggaaccactgctcctcaatggggagggaacataccacccagccaggcttagcattgggttttatcctttaataaaagttttataatgaatcctgttcaccttaaagtgtgattatggagatgattggctccatatttcaccacgtcattccttcaactcaccagacacctttctttagttgaaataaaccagcatgacctggagatcatggtgactgtaagctaagtctgttttcatgccagatttcagccccacccagagtgtgctctagatgttgttgatttgaatggttttcccagttcccactccacatggggaagttgaatgaatgcacacctgctgctcacttcttgtgaggctgccttttgtgatcaaataacaggaagttctgctttagaggagggcacgatgaccatgtggcagtctgcaagtggaattttgggatggcagcccgaggaacatccagagttactgtgtgacttggtcctgccattgttagctttgaaatcacaggcattgggctctgttttgacaccattcattggactgcgggacagtcattctttacgttctctcttgagctggtgagagaggaggaagagggaagtcaagagcaacctccaaggcctatgtcagcctcttctccttgggtcttggggtgggttagaactgggttccagtctggccagatgggttgctggctgcactgagggtgattcttctcagaagatgggctgcctgtggtcaggacagggcataccagtctggactccaccttcccagacacctactttaaggacctgtggaaactgggtgatccaattatagggctggggcaaccctgctttggccaccctcatttacaaacttaggttgggagcttgggtttcctgtctcacttccaaaagccttcaagatggcagcagatggacacaccctctcatttcttgtgtcttgtctgtcagatggcaggaggcctgtatcagtaaatttgaggaaaatgttctctcctgggccagcctcacagcttgcgttgggtgtgttggaattgttctcttcggccttgttctgccttgtgatcttttcaattcagtgaataaaccaggtatccattttttcaccaacccaccctgtagattgtcagctttttgtttgagagatgcctggtctcacagttacatgtatcagagtgtgtgtaagttgtctgtgttagaaaggttggggtgggggctttgttgcaggggattagactgttctttcttcatcataatttgagatacatcctgagtatgactgtctaaccctttctgtgtggcagaaaaatatgttttccaggtagtttttactactacagagagtctgtaaataagtgctttaaaaaaataacaaaccaataagatatttgtctcctatataaacattctgtgtatttagcacttgaaaatcaacaaatccagaatttaaaaaaatgccacagacttttcaaagcccaactctacttttttgagaatttgtccgtacctactaatatgccttattcttcttcacctagtgttttaaaagtcctgggtagaaagagttttagaaatgtaatcagttgttcagcttcaataatatagagatctaacatagtcagtcctcaggccccctaaagaaacaagcaagaaagtgagggccatcactagggttggctttggggaggggaaaactaaggactgcttttgccaaatgatatttttgataatgtaaggaaacacagggaccacaaaacctttttttttttttaagtgtgaaagattagtgccttttggcatacttttgattttagaggatatagtatcggcattgacaaatcacgtagaaacaaagaatgctatagatgacaacagtattaaatgttactcctgattctgcagaacagcttttgaagatactggggggtatcttcaagcctcagagcagcttgtttcagatagaaattctctatgggttgaaatgccaaaaacagaaaacatgatgttgactcatgtaatttagtccattttagcagagcctttagtgttaacaccagtggcgaggagcattgcatattctctgtcagcagcagcactcccacaccaggtggttctgggctctctgtaggctggtcctagtaggtgacacccagcaacacccctgttggacaggattgattgttcgcagtcttagaccaacacttcagtcagaaatgttactgggaggaggaaaggaaaatcactttttttcctccatgtggaaatgaggagagaggaaagtggattgcaaaccaaaatgtgagtcagtgtgatgaagcagtggctctgtcatctcggcctttatccaataacaaaccagcatctcttaaaggcgcttttggcctagacacccctgaagtttggatgaagtctggtggattccctgtctgttgtatttctgtgtgcctgttcccttcattgctgtgagttgggagtgcattgagagatgatgtccatctgatatattcctgtgaaataaactgccagcaaactttctaacttgtattttaactgttaaagaagagattaaaaacttcggctttggacatgtccacattatggactgtcatcttatttttaaaagtcattctttacgtttaaaattttaaaataaaaaccttctgaggtattgatgtagtccaccgtgtaaatgttaccttctctccatgctgccattatgccaaaacaaaagctgtgataaaaaaagtgcttgagagagtgtgttgataagaaagtgatttatttacagatggaagtctttgtttcatgaagctaccaaactttaaaaagaatgtcacccttttttttgtttgttatggaaaccagagattgtaaaatggaaaaagaatcgtttttttgttgactttttgatgctggcacgaggtttttgtccacttttttcatatatctgtgtataaaaaaattgttgtttactatggaattagtattacattttgaggtaaacaaaagaatttgtattgcttgataaatattagcttgtaaatttaaagtttctttacttcaattaacttaaaggaccaataaacccataaaagatgctttctttatctggagtcatgtcctcatttgtacctttttgtaaggcagaaaaacatgtgtgcctatttttctgttttcttattttctctttacaagttttcagtttgcctgtaagaatcaagacatacagagcgacaggaaaaaatatatataattgaactatttttattcttcttcacttctttataggcccagtttaccctcaatttaccctcttctacatcttccacatctgcaccaatctggggagatgaagaaacttcctagtgtagtagccatcatgactggcaggcaggccgacagccagctgaggtatttactacatgaaagatttcctgtgttatcccatagcaaagcacaacattatattctgcatcagggccagttaagttgacctgatgatggtaatgcattgaacttgagtatatttaaaatagtgctcaacttgacttactttaagactgcagtcatacaaaataaggcagcaagctgaataagacgtggatcatggatcaaatctcagcttttccacttactagctatgtggctttaggcaagtcacacttggctgaatatttagtattacgatctttgagatgaaaacaagacttccacatggggttgtcgataggactagcaatatggtatgcaaagcacttaaatgtcaggcagcttctcactgtgatagcccctttctaaagacttcctaatttaaatattaaggctattaggatattatccttaaggatatggccaatttaaatattaaggataacaatccttcatgtatgctttgccagtttttttgtttaacaggatattcttttttttttcttttgctttgtcacccaggctgaagtgcagtggcatgatctcagctcactgcaacctctgccttccaggcccaagcagtccccccgcctcagtctcccgagtagctggtgctacaggtacgtgccaccatgcccggctaatttttttatttttcgcagagacggggttttgccatgttgcccaggctggtattgaactcctgagctcaagcaattcgcttgccttggcctcccaaagtgctgggattacaggcataagccactgtgcctggccctgttttctttttaacaaggtgatggaaataaaatactgaaggacggtgtcagattgaaggcctgaagaatggggaggaataaattccaaaagccatggcaagaagtgataaagggaggtgaaaatagccgatttaagagattcttggggggaggagaatggaccggagatgactggaagattgccagcctgggatttggaggcgatgccattagctaaaattaggagagaaagacagaatatggaggctgggcgtggtggctcattcctgtaatcccagcactttgggaggccacagcaggagatcacttgagcccaagagttaaagaccagcctgagcaacgtagaccccgtctctacaaaaattaaaaatcaaaaaagatggaatgagcttaggtggtggggtgtgagaaggagaacttggtttcgctttaggtttga

SEQ ID NO: 854 - DNA, 1140 bp, Homo sapiens
ggatctcattttgcccaacggtggtactccagcaggtacttcaagtccagcttcttcatcttcccttctcaacagacttcagcttgatgatgatattgatggtgagactagagatctcttcgttatagtcgatgatcccaagaagcatgtgtgtacaatggagacttacatcacctataggatcaccaccaaaagtactcgggtggagtttgacctcccagaatattctgttcgtcgaagataccaggattttgactggttgaggagcaaactggaagaatcccagcccactcatctcattccccctcttcccgagaagtttgtggtaaaaggtgttgtggatcgtttttcagaagagtttgtggagaccagaagaaaagctttggataaatttctaaaaagaattacggaccatcctgtgctgtctttcaatgaacactttaatattttccttactgctaaggacctgaacgcctacaagaagcaagggatagcattgctgaccagaatgggcgagtcagtcaagcacgtcactggcggctacaagctgaggactcggccgcttgagtttgctgccataggtgactacttagatacatttgcactcaaactgggaaccattgatcgaatagcccagcggatcatcaaagaagaaatagagtaccttgtggagctgagagaatacgggcctgtgtactccacatggagcgccttggagggtgagctggccgaacccctggagggtgtgtcagcttgcattgggaactgctctacagccttagaagagctgacagatgacatgacagaagacttcctacctgtgctcagggaatatattttatactctgactccatgaagagtgtattgaagaagagggaccaagttcaagcagagtatgaagccaaactggaagctgtggctctgcggaaggaagaccgccccaaggtaccggcggacgtcgagaaatgtcaggatcggatggagtgtttcaatgctgacctgaaagctgacatggagaggtggcagaacaacaagaggcaggacttccggcagctactcatggggatggctgacaagaacatccagtattatgagaagtccattgcagatctgaagtgatggcctagggagagagcagg

SEQ ID NO: 855 - protein, 362 aa, Homo sapiens
DLILPNGGTPAGTSSPASSSSLLNRLQLDDDIDGETRDLFVIVDDPKKHVCTMYIYITTKSTRVEFDLPEYSVRRRYQDFDWLRSKLEESQPTHLIPPLPEKFVVKGVVDRFSEEFVETRRKALDKFLKRITDHPVLSFNEHFNIFLTAKDLNAYKKQGIALLTRMGESVKHVTGGYKLRWLEFAAIGDYLDTFALKLGTIDRIAQRIIKEEIEYLVELREYGPVYSTWSALEGELAEPLEGVSACIGNCSTALEELTDDMTEDFLPVLREYIKDSMKSVLKKRDQVQAEYEAKLEAVRKEDRPKVPADVEKCQDRMECFNADLKADMERWQNNKRQDFRQLLMGMADKNIQYYEKSIADLK

SEQ ID NO: 856 - DNA, 22343 bp, Mus musculus
  misc_feature (1)...(22343): n = A,T,C or G
tcccatgagattgaagcacagcgcgcaagtgaaactgaaagatatattggagacccagcctgacagggtgagcctgtaatcccagctgttctagccgatgaggctgaagggtcaaaggtttaagacctgcctggactactaagcaagttcaacgatagcctggtcaacttgatgggatcctgttccaaaatgaaaaatagcaaaagggctggtcatgtagcttatttggctagcatgcacaaggccctgggttcagtctccagtaagggagaagggggaggggaggagataggagaatgctcagtggttaagagcttgccagttatatacaaggtgctgagttggatcctttgcagaaaagagacaggaagaggggaaggagtacagagggagggggtaggggagagggggagggagacagaatgaatatcaaatatcaatttagtctatgaccatactaccctgaatgtgtctgctcctgtctggtctcagaagctaagcagagttaggcctggttggtacttggatgggaagctatcatatcggttagaccagtgatgctcaacctgtgagtcacaaccctctttgaggtggtctcctaagaccagtggaaaatacagatatttgcattacaattcataacagtagcaaaattacagttatgaagtagcaacaaaagatctttttatggctgggggtcatgacatgagaaactgtataaaagggggacagggtcaggaaggttgagaaccactgagtgacaggcacagccaggtcacatctttagaaagaattcagaacttcacttttctctcctctcattctattcttcctttcctctccctctctagcgcttccttcttcctgactgctcctgttctttgagacagggtctaactctgtaatccagggtggactatgtactacaactcactgtgtagcccaagctgccctgaacaccaaaccttagcaaggctgagactgcagagacatgccactacagccagcaagagataatctttatttatttatttatttatttatttatttatttattttggtttttcgagacagggtttctctgtgtagccctggctgtcctggaactcactctgtagaccaggctggcctcgaactcagaaatccacttgcctctgcctcccaagtgctgggattaaaggcgtgtgccaccacgcccggctgagataatctttttatccttccataaacaaagaggcagtctcaaacggtttttaactgaggaggtgactaatatgccacaactgattcaggattagataacctggctcccggaaaaatgactgaagaacaagagattgaagattcccccacttctgaagttcaggagattgagccagaaggtccttcccatgctaccatgctaggcaactgctgttcttgcggcctgtgtctctgagagcattcaccactctgttctctctctctctctnnnnnnnnnnnnnnnnnnnnctctccccccccctctctctttctctctctcacccaaatttcatattactgtggaccctctcccttgtaaagcagatactgcaccaggtatgatgatatatatactcttgtcatctcagcactgaggagtctgagacaggaggattgtcacaatgtcaagcctgggttacacaagacactgtctctacataaagacttaaacagttttatgaattttaccttctaaatcctctccaacccatgatttcctcagcttcagcccccacactttaaacttgcatcacctctcatctcaggacagtgtgagtaaccccccctctcttttcaattgcttcctctgacccccaaagggtcattcaaaatgttactgtgtttgtatatttaaaacctctttttcatttctcggcaactttgtacttgatttgtttgttttgttatttaaaatcaagtattaaccagtttagaagcaggtatgcacatgtgtggcagcatatgtgtgaaggtcagagggcaacttacggaagtcagctctcttcttccaccatgcagattctgatgagtaaacttgtcagacctggcagccagctcctttacccactgagccatcctgaacacactgttcatttgttcctctcttcacctgaccaactgctactcaccatcagagacagtttaaggctgtttcctttgggagatgttcctacatagacctctgttcctttccagtcagactactactatgccttcccataacattctatactattatcacactgaggtttaactgtggagtccttgaagaagtactccatcagatcaggttgtgtcttacaatctgttcttctgaccattgtttgagccccacactttgggtgctgtgcaggatgccagggatatagctagagttacagtggttatgtgctaccccatgtcaatgctgggaactgacttcagatcctctgcaagagcagtacaggtcacttttaacatctctggccccggggttccatttttttacactcgctgtttctgtactttcattcttctttgaagttctgttcatatttctaccattcactttcctactaaatgcccctggcattgcagaagtccggtaggcatttcacagagtaccttccttcccatgggagtcacagtttctacttcccttcttcctaactcacatcccaaaagtgggcagccttccttctcactgtggtttgacctgcagttttactggttttgttatttattctgagccagggtctccctacccactccatgttggcttgaaatagcatacccatcttcctcctgcctcagccttcagagtgcaagcaatcctgggattaagggtgtgtaccaaggggctggagagatggctcagcagttaagagcactgactgccctcttccagaggtcctgagttcaattcccagcaaccacatggtggctcacaaccatctgcaatgggttcgcatgccctcctctggtgtgtctaaagacagctacagtgtactcatgtactcatataaaataaacaaataattctttttttttttaagggtgtttgccacctcacccacaaatggaaggcctcatcctttgccattctccactctgtcagggaactgatgaaaccatctcttttctctgccatagcatctggtagagctgggaagggagattctgtagcaggctcttttttcagtcctttaattcttttcatttctagcactttccggagcctaccactggccagttaagtattactgaatgcattagtcataaataaataccctgtccttccaaattaggttgtgggtgtggtttctaagaggtttctacatcacaggaaagctacgaacgagagggagccagaaacatccaatttgggtctaggggcgaaaaaatgggaaggtacacttttaaaaagtatgtggaaagttaaaagtgtgtttcatgatcctggatcgtgtcacatgtgtatatgtaccttaagcacaaggcttcggtttttgtaaactctgttggacctcctatctgaacaaagtatgcactgcattggtgtttctgtgtgctttccaagtgagcattttttcctaggatatgtgtgaaccagagacgcggtgttttcaagggaaagatagcctgggccggaactgaggaaccaaggtaccatttgaaattaaggttctcaaagcgtatattgccgagtagagagagaagagggaattcctgcaagaacacaaaaccatggcgattttgaaggacagagttctaataggtgttccaggtcattcaggtacttcggggccatgcataagtaggaagtggattccatgcttcccctcagagaatccttggggcggggcgggggactggatactcccagtcctcccctccccctcacaaggcggaatccccacggggctttggcaaaccggtgcaacgaaagctgcagaatcgccctctttcccgctgggtccagagagatggcaaagagtcttaggccgggtttttttttttgcaaccgcaccccctccccaccccgccctctatcgctgtccctggggatctgcccccaaggctaggagggcaggacagagtagcgatgtggagaattcgatgtccgagcgacctcctcggaggagtggatcgagttaaatataactgcgcgaatggaatggcgctaaaaataaggtagcagctggcagatcctcttgccctgtcccgggaaaggagggggcaagaatggtttcgcccagggagtagctaggaggtacggcttccgcaacctgggtcgggggaccactgaggctccactagattgtccggaaatggaaaggggtagccgtctggggggcgagtctcaggtctggccttgggatgctctgggctttcaaaggggtcagaaggcttgaacatgcgcctggacgtaagggtcgaagggcggggcatccagatatcataccctgccgccagggggagctgagcactaggaaagacgcggagcttgggaggttgatgggtgggccctcaggatgagggtgcatcgttgtcaccacgcactccctcgaggcccacggtggtcgcgtcctctgagcgccccgccctacccgtctcagggccccatcatcagatccacaattgaaacgtttccaaaacgggctatttatttgttcccaataaatcgatcggtggtgattaagaaatcgatatggcctgggtgggcgagtctcgccgccagggaaaggcgcttttgcgcgcgcccgcaggactacggagggtaggtgcgggccacagaaaggcgtgcccggacgaccacacccgaagacagggtacctgggcactcttgctcagggctgtcgaatcccctcgggctgcaagccgagggcacgggtgagactcgccacagacccttccttttttttttttttttttttctcccgcgcgcggtagagctgaggccgccagcggccgccgcgcggccccgaggcttttgttgctcctcggctggctgaatagggattttgtaaagcgggacagataaaaatgagcagcatcatattgtttgacagaatgatcccgcgtgatgaagtgtcggctccgaagggggtgaaaatggtgaattcctaaaaacccagccctcggcttctccagcagctaccgttagcctggagggacccagcggacgccgggcccgcggtgtcgcatcgaactgcgtcggcaagactctagcttgcaatgccaagtcatttttaagccctgatcctgcccagaatctttctcctcgcgaatgaaaagaacaattttcgagagaaaggctcgttttgattaaatctgacatgctgctgataactccatgctaatgtgaaataattaacataatagccataattaaaagcacgctaacaatgccataaatttatcacacaattttactagctttctgcccctaactgctctctcatcgttaattaaacgtgttgccttttacagaatggatgtttatacatttccaatataaataaattcgaaaccatcctctctctcctctctctctctcttctttcctttggtctctcgccattcataggcacgcggattgtgtgtaccaggtactgaaaataaatgaagtctcgagatgttaaatttaaacaagaacattaaattagcctctaccccctccaaccctccccaaaagagttctggagagttatggggcccagtgtttgtgggtcatggtgtgttgaaaacactacccattaggcagatgaaataatctgcatgggttagggtcccagatatcacctctgcctttcccatctcccttggtggcaaacatccagacaaaaaggctgatgatggtctattaagtctacgaaaattgtccagaaggagcggactttggcttggaggcaggtaatggatcccagaaaggaaagctgtctttcaatttcaatttttccaccatggtttgttttctctgctaaaggaggtggctgccttgggtagagagacgctatcctagcttctcccaaggtgatctcatcttcccgggttgttagaaaagtgcatttgcccacaggaataatgactatatgcctgcttcaatgatttggtcaagcgataccatagtccctgacttggagggagagagagctcctggggtcgcctaggcctgactggaccattctgattcccgcactctctgaccctatcctcctcccgtgttgaccacctaagaatccaaattgagttgtaattaatttccccctctccatcataaattggcccatccacatcctcttccaagagcgcacacactaaatctctcctctggagacgtctcaattttccttccatcgatcctgaccctactcttcttgcttccttttactagaacctaggttccccctccactcctggaccactttcagtggcttccccagccctttactgccaactctgccagtcccaggagaaaccggtgtctctccacttcattctcattaggcggaatcggttccaacacttgagcaggtgaggccgctggctgccaccttacttttaaatatctcctgggaagtttgctggctgacccaagttgtcattcccattcttaactgtgttacagtgtgcgccccttctccctcagcgaccccaataatctttggcgactgaatgtttatccttgctcaccatttcggttccctgtgtcacgcctcccaccccaaagtatatcactctccccgattctttatttcggttgcaaagtttcgcggtgtctgaggacataggtttttagaggcaagctacaatctcaccgctaactatttagcgcggaatccagctggcttcaggcagattcccgcggcgatgagccctcccccccgccaacctttctgcctctcacctgtactacactaccgcttagctgctgcttcctccagcacagaggctgtgccgaaactgatgtccacccgaagagaagaaaaccacagagggtccccaaacagagcgatcacgggaatctctgcggtctcctctagaaatcgatattaagccgctaggcccgcgcgggcgacgggtttggggacagcagcctgagcgtctcatcatttagctaatcgagtcgaaaagtttctgtaggggccggacccagcatcagatggtaacactgattgaacaagagattagcacaatagatctctaaccgaggggaagcgttgcttttcacgctacgcaccgtaattaatggtatgaatcaattaatttgacttttattgtgtcgaaggaaaaaggcgcaacaaatggaaccggcagctgggagttgttcaccacccctttccccagagaggttccaaggagatacacgggaacggaccgcccagatccggccttggcgaagggggagaggcagccgtcaacgaggcggacaaagtctcctgagccagctcaggctagccgggaaatcgaaattaggctcatttggagactaaaaagcggcctcgagagcagccttgaagccagggttctcgcgcgcgtacaagccttcgccagaggctccgccatcaagatcgcggtccggtccactctgagccttgcgcccgccaatacaactggcaatccaagttgggcaaaaggttttcctaaatttgtaaatttggatcgtgttttcttttcctccccaccttcctttgagttgcttgagcagtcgccactgtgacctcttgcctagggtgcagccagctccagctggtagctcctgtcggtttcccgagaagactgtctagtcagcggaatagacgtttttgagtcagcgcgtcattagtggtgcagctgcggaaatcaactcaggcatgcgttttagggccaggtgtaaccccaagatcaactggaaacaaacaaacaaacaaaaaccatagagattccagacctctcaggatagtcactgctctccccacccccacccccgccccccaagcctgtagccgcccaactcggagcagcattgaaatccatacgcaaagagctactggtattgatgggagagttgtgtaatgggataatcgtcaacctgtggtgtcctaatgcctgtaaaaatgcaattttgcatattaagatattttattaatttgatgtaactaggaaaaatggctctaggtgacgatacagaatcagaggcacactggcaacctggaagtacctaactttttcgctgtttcctataaacaatacagaaattgtttcctccctgacttcctcctctcattctcttataacctggggttcatagatccttcccctaggccttcagcacacaaattaatcgggtttcaagaaggctcaaatcggtaagtgctctcctctgacaaagaagcggcctaaaagcgaggggggtggggttggtcagggcgaccaaggtcatctcaaaccactccgggctgggaacaccagttcccctcggacggacgtaccgagtccactcacctcagcaacagcaggcgctgaccctgggtcactttaaagtccccaccccagcatctctgggatttcccagtctctcctaccagagctgacattccttgtacttcacgtgcgctggacacatcctcgcctcttctttggcgcagatttctacagaagttaagtcttggatagtttattcacactttaagagataacccacattagttagcagcagaggtgagcccactcccgccagcacgccctgggacactgtggttccttggaggtcgtgccctccactcggaagtatacgccagctccccccagttttccaaccccccccagtcggtgcgccacgtctaataacaaggcccaaagcctcttccccaatcctctccacttacccaagaccgctgccaatgcctgctccgtttccagctcatttccgactttttctgtgctaagtcgtttaacaactccaacagccagttatgacgtctttgtttataggttccctgctattttacgtcctttttatttctctgcaactatcctaataggttaatcgatagctattctctgacctcgggaaaccccagctgatggtgttgtgaccgttgcgaatatatatatatatatatatatatatatatatatatatatatatatatatatattcctgcgtcgtgcccggaaagctagggtaagacttgagtagttagatttgggggtgatgcgaggcacatcagcagatgtcttttctctggaatagccctgaaacaggagggggtctgaggcctaattagcaaaaggaagccggatgtgttcctttaatccttgaatcgaaaacaaaaccccaaagcaaatcaaaatagtaagtttttttcttttcttttctttttttttttttttttaaatcacaaccttgttctgcattgccagttggtctatataatattagcaaagaggggagggcagggtagtaaaaaaaannnnnnnnnnnnnnnnnnnnnnnnnnnnnnnnnnnnnnnnnnnnnnnnnnnnnnnnnnnnnnnnnnnnnnnnnnnnnnnnnnnnnnnnnnnnnnnnnnnnnnnnnnnnnnnnnnnnnnnnnnnnnnnnnnnnnnnnnnnnnnnnnnnnnnnnnnnnnnnnnnnnnnnnnnnnnnnnnnnnnnnnnnnnnnnnnnnnnnnnnnnnnnnnnnnnnnnnnnnnnnnnnnnnnnnnnnnnnnnnnnnnnnnnnnnnnnnnnnnnnnnnnnnnnnnnnnnnnnnnnnnnnnnnnnnnnnnnnnnnnnnnnnnnnnnnnnnnnnnnnnnnnnnnnnnnnnnnnnnnnnnnnnnnnnnnnnnnnnnnnnnnnnnnnnnnnnnnnnnnnnnnnnnnnnnnnnnnnnnnnnnnnnnnnnnnnnnnnnnnnnnnnnnnnnnnnnnnnnnnnnnnnnnnnnnnnnnnnnnnnnnnnnnnnnnnnnnnnnnnnnnnnnnnnnnnnnnnnnnnnnnnnnnnnnnnnnnnnnnnnnnnnnnnnnnnnnnnnnnnnnctggtgaagtgagggggtgcggcgtggaagaaacctccggggtcgcgagcagtagctgtctcctcgtagagaagcgtcgaggcaccgcaagagttcgcggagcgcggctgcggagcgcagcgcccgcaccgcgcgatgccaggcctcctcgtgtgagctgacccgacagggccccgagctacctgtgccctctcccccccccccggctttctttcgggggacactcacacctcctttgcctgagctccgcggccgcccctcgcggcccccctcgctctctgctcgctcctggccgccgccaccaaccccgcggagggatgaccctctccggcagcggcagcgccagcgatatgtccggccagacggtgctgacggccgaggacgtggacatcgatgtggtgggcgagggcgacgacgggctggaggagaaggacagcgacgccgggtgcgacagccccgcggggcctccggacctgcgcctggacgaggcggacgaagggccaccggtgagcgctcatcacggccagtctcaaccgcaagccctggcactgcccaccgaggcgaccgggccggggaacgacacgggagctccggaggccgacggctgcaagggcggcgaggacgcggtgacaggcggcggtgggcccggcgcgggcagcggggcgacgggaggtctgaccccgaacaagcccaagaacagcctggtgaagccaccctactcttacatcgcgctcatcaccatggccatcctgcagagcccgcagaagaagctgaccctgagcggcatctgcgagttcatcagcaaccgttttccgtactaccgggagaagttccccgcctggcagaacagcatccgccacaacctgtcgctcaacgactgcttcgtcaagatcccccgcgagccgggcaacccgggcaagggcaactactggaccctggacccccagtccgaggacatgttcgacaacggcagcttcctgcggcgccggaagcgcttcaagcgccaccagcaggagcacctgcgcgagcagacggcgctgatgatgcagagcttcggagcctacagcctggcggcggcggcgggcgcaagaccctacggccgcccctacggcctgcacnnnnnnnnnnnnnnnnnnnnnnnnnnnnnnnnnnnnnnnnnnnnnnnnnnnnnnnnnnnnnnnnnnnnnnnnnnnnnnnnnnnnnnnnnnnnnnnnnnnnnnnnnnnnnnnnnnnnnnnnnnnnnnnnnnnnnnnnnnnnnnnnnnnnnnnnnnnnnnnnnnnnnnnnnnnnnnnnnnnnnnnnnnnnnnnnnnnnnnnnnnnnnnnnnnnnnnnnnnnnnnnnnnnnnnnnnnnnnnnnnnnnnnnnnnnnnnnnnnnnnnnnnnnnnnnnnnnnnnnnnnnnnnnnnnnnnnnnnnnnnnnnnnnnnnnnnnnnnnnnnnnnnnnnnnnnnnnnnnnnnnnnnnnnnnnnnnnnnnnnnnnnnnnnnnnnnnnnnnnnnnnnnnnnnnnnnnnnnnnnnnnnnnnnnnnnnnnnnnnnnnnnnnnnnnnnnnnnnnnnnnnnnnnnnnnnnnnnnnnnnnnnnnnnnnnnnnnnnnnnnnnnnnnnnnnnnnnnnnnnnnnnnnnnnnnnnnnnnnnnnnnnnnnnnnnnnnnnnnnnnnnnnnnnnnnnnnnnnnnnnnnnnnnnnnnnnnnnnnnnnnnnnnnnnnnnnnnnnnnnnnnnnnnnnnnnnnnnnnnnnnnnnnnnnnnnnnnnnnnnnnnnnnnnnnnnnnnnnnnnnnnnnnnnnnnnnnnnnnnnnnnnnnnnnnnnnnnnnnnnnnnnnnnnnnnnnnnnnnnnnnnnnnnnnnnnnnnnnnnnnnnnnnnnnnnnnnnnnnnnnnnnnnnnnnnnnnnnnnnnnnnnnnnnnnnnnnnnnnnnnnnnnnnnnnnnnnnnnnnnnnnnnnnnnnnnnnnnnnnnnnnnnnnnnnnnnnnnnnnnnnnnnnnnnnnnnnnnnnnnnnnnnnnnnnnnnnnnnnnnnnnnnnnnnnnnnnnnnnnnnnnnnnnnnnnnnnnnnnnnnnnnnnnnnnnnnnnnnnnnnnnnnnnnnnnnnnnnnnnnnnnnnnnnnnnnnnnnnnnnnnngtttttatttttttaagaaaataaaaagcaattcagtagatttagagctttgaactttcatatttttttgaaggttcactctgcgcagttttatctgagaaaaagaatgtataaagacgttgggagattttaaatccaaaaaaaatttttcaaaaaggcgaagtgtcattgtattataaaagtctgtttatatatgaatgaatatatatggtattctaaatgttattccatcgtgttgtacacaattttgtaaataaatttttaaaatgctcagcctagtgttttaattaggtgtctagcaaatggcaagattttacaatggaatttgcattgtcttccccagaaaatctagcagtcttaagtaatgaccttttcaaacgttgcaaattcacaatttgggtgtagaaacatttgaatttgaaaatggaaagagcgtacttaatttaaattatattaatatgtgacttttcacataaccaggataaggatgacaatcccattcatatcaagccactgtgaatgactcgcagctcctgcaaagtgtgctgtcattaaaaatctaggcaaaagcagccttgttcattttaaagaacattggtcgaatataaccccctaggcaaacttacaaggagtctttggtcatttgaattgtcctttcaagaacaaaattccaaacatctcgtattttagcatttaaacctcgggtttttggaattccttttcatcccttcattggaaatgctaaatctcattgatttttaaactcacatggtaccattttggcctttgtattgaaatagtatcttgcattacgatgataggcaatagatcgtagggttttgttttttgtttttcccagaaaaatatcaagtaaaatccctctttttccattgcaattatcaactcacataactagatatctagaggattcccgaaccggtaacccctcctctcgagcctttcagaaggccaaggaatcataatactcttctaaagccaggtgcatgttacctccgccctttttttctaccttagccagattcatgctttttttttgagagagagagagagagagagagatctaaggtaggagtaggaaatatccttgtagattattttaggtatgcatttcagctgtttcaatgttttaggttaagtagaaatgaaaggtctagacatgggaggtctgttgggccaccaccagcataccctcaaacggcatcaattctaattattttgtaattaattagctgttacaattacttatgcgaaatcagtttttaactccgaaatcataggtagcagcgatgtcaattccaccctgcgagcgtcttgtcggtaaaacccagcaatgtcagcagtcgtgtccactcctcgcttcccactcggaagccgagcctttttctcggcggccggcgtgggcttgggggtcgctctgaaagacacttcctcgcatataccgactctgttttcctggtaaatgataaatgctgtgtcctgagtaaacattccgccgaaagcggagtcttaaaataaaacaggctgctggggtgagagtttttaacttgataaacaacccgataatgagccctgctgaagaagctactgtaacgttcggcgaggagagctttacttcgggcgggtcccttctaatctccttttacaaggaaaactaaacggatctaaattggtttgtgcgttgcagctataaaagtcacaagttgtttcacagttgtgtctggctaatcggtttttacacaaacagcaaatggtacacgatttgtgcaaacacacagaggttacttctaaatttagctggcacccctgggaaaagagaaaggcagggcttcttgaattcacttttagcctcaagaagctgctgatccaaggcttctaaatgacattggataacaggggcctcattccatccctgatcctttgttacttataaaattactcgctcatatttccgcgcatagcagcaataccggccgagcctgagcacgcagcctgacactcggacacaagctgccgcttgagatctgcagtgccttttccagcgacgcattaggcagcgcggtgtagaaaccacggcaactttccttccagccactttcgctctatcaacaacagcctcttccccgtgtagttagaggatgggacatctcatgcccaaacaccagcggccagtgtttattgaaagtcctgatgtaataccgggaaagtagagcccagccatacccttggaaaagaattgagcttacgctgtttaaatggtgaagatttagagaagacgatgaaattttttttttaaatgtagataaatgtactcaagcacttagtaggttggagcaagctttaaacacaggtttgatgtttttagacacgcgataaaaggtgatgaaatccctctaaaactgggattttaaaacagtgcgattgccacctgctttttattacagctttaaaaaaagagaaattaaaagaaaaaaagggaataaataaaggacacaggttgggtataaaggaaagatgctagccttttagttacactccgatttaagcattcattcttcgcttcctcaggcaaggatttccagacattcaattcactctcgaagcctgggactcctagtgtgacctcggggtggagttcccaagtaggcctctcacccagtcccttgcgggaatgtagggaggattctgaaggttcaggggaaaaaaaaaaaaaaaaaaaaagtgaaatgctcatactagctgagcggaatgtagctgcgatggcggatgtggcctgtagggggcgacgaacagatggaaaactcccgagctgtttttgaagctccaatgccagacctaaacccctcgcccccaacccctccccagaccttttcctagccaggctctgaaccaaccccccctgacaccatccttcattctcaggtcctggaactactaggtcgaatctctgagaagctgctatccttggccggtgtcctgaaagggatagggtctggaggcgaatttgtcctagaaattatgaaacagtgaaatttagtgatgagaaaacactgtctcggaagcaactaagaattatatttgaagttatttattttacacgactttatgggaagaaccttagtagcgaagagagcacggaaagcggggggggggggggggaggcggagggggtgcgttttaaagcaagtgccgtgagaactgacccgaagagaatgaactgaaagaaagccagctacagagacatgagtctatgcaactccacctgtgtcccgggaggtgcaggctacagcaggatccaaatagttggggtgggatgggggtgggggaggcagcaaggtgagagaggcctctcagaaggcattccaaccaggtatatcctttaactttggccaagcagcctgtgttttgattttggtttttttaaatctcccaaattgtttgattctacctgcagaattaggtttgtgttagttgagggcggggggggggtgtataaactgtgaagtgccccacggtcacaccgatctctctccttttcccgcccccatggtctctagacagaggaacaacgctgctctaaacacccaggtgttcgccttggttttgagcgtcttgatttcatatgtgcaagagttttccaggatgggtcacagaacccagtcccagcaccctgtggcagctcagagtggcttgtccaagattccagtctcaaatcgtcctggacgcctgtgctctgggaggagagtacccaccctcagatccacaccgctgaggggctatagtctcctttcctactaaagaggttgcttccattaactaacctgggcaagttgggaaatggaagacctgcgctgacagaaacccattagctccaggcctagcttcggaggcgagttgaagataatcacatcgcaaaaacgcctaaaaagaccaccctccttcgtcgccctctaactgttggctgggtggcacctacagccacttattctccaccgccgcccccttctcatgtccttttatgaatggacgagccattctttgctctctggggtaaaactaaccaaaaaggactctgtaccaaatagtatttgaaaagaaacataggacagacgatcacaaccatcccggttttatttattcacatgatgttttacatcggaatttccctaaattactctaaggattacattttccctacattttgtggagaattaaattagtccacttccctgatttcatcataaaaccaaaagctgctttcctcagaggactttgtgtttttgcacacaggtccatcccgccaggggtgggaaccaaggcgatatcatttcctttcaaagctcacacctagaatacggctttacagcgagtgtcaaggagactcgtccccttcacacatacatagctacagaagactccttgacttgcccaaagtcaaccaccaggccaagctggtcgaagtctcgaacacgaaggaacgtgttccttgcccgaggactgcgccatctggggaaaagaaaacagccggccctggggcaaacgaaggtgggagctggagaaaaaaagctaagagaagcgccaggcatgggcagctgtggaaagggagcagcagacttgggccttgggaccttccttccaccccgggtgccttcccttagcatcccggggaccggtgcctcgggtaccgcactgaacagctctgtccggaccgacggcggcttgacctttccgtgagaatttagaggggagaacgcggagacttaggccagaagctctcttggccagctgggcaagcagcccagccacatcgctgcagggtcaggagtggatgtcatcggtgcccgccacctgctctctgcgcatcactccccctacatcagcctccagggttccagctcccccagcctagaagtgtaaatgggagaaagacctggaacgcattaggaaggctacccagcgcggaaaggcacccactgtgaaggtggtgtggagagggatacgcaattggcacaagccctctggctgagtcctgcgttgtccagctgcgtgcgctcaggaggcaaccgatgggaggcaatttcccccagagtcaaccttgcagcagaagccgcagctgggatctcaggtaagttaccatgctcggctatggctgagggtctcagaaagaagcaccctcactccaccatggcccgcgcctgtggggcctaaagggaccccgcattagaagagtctcgagaagcaacttttggttccttttctctcaagacacctcccactcctctcaacaaacggtagacaagnnnnnnnnnnnnnnnnnnnncaacaaacggtagacaagactcagtcttcatctaaaacacaccctttgtccttgttacatccttttctgcaaagggcgtatgtccgattcatggggaatttttcactaatacaacctgcaggcactaagttttctcattgctctcagacttcacccccggaacgcagcgccccctccaggaagccttcctcaaccttccaatttaggttagtcgctccttctctgaggtcacccatgcgcagtaatgactcagctattcattctctggttctctgatgaacccccttactacctaacactgctggacacaaggggagcattcagattagaagcatctgacctcaaacatgggcttggagactctgagctgatcaaaccaggtcttaagagttggaaggaggggctggggagatggctcagcgggtaagagtgcccactgctcttccaaaggtcctgagttcaaatcccagcaaccacatggtggctcacaaccatctgtaatgagatccgatgccttcttttgaagacagcaacagtgtacttagatataataataaataaaatatttttaaaaaagagttggaaggactgttttctttccatccttttctccgggccttttctttataataaataaatgcttttataaacaccctgttaattttttttgacgaagaattttaaaaagcatttattagagatctaaaacgtgtaagacacatgagctgttcattggattttctgagtatgttttctttgccaccataaaatcggccaaagatttcttgcctgaaatagcagcagacgcacccatgtaatgggagatccctcaactgcctgtttcattcactgggtgcttcagctttcaaactgaagagaaaaccaccacctcacacttagggcatcctaacttttttttttaattctttttttttaagatttatttattactatatctaagtacactgcagctgtcttcagatgcaccagaaaaggacgtcagatctcattacggatggatgtgagccaccatgtgggatttgaactcagggccttctggaagaacagttggtgctcttaaccactgagccatctctacagtctgggcatcctaacttcaaagtctttattttcctgggaaagggtaatcgctttaaaagagctctttgcttgagtttttataggaaagatggtgccagtctatgttgggattctttatctagaaacacaaagaatccattgtggtttagcagctacagtaaaactgggtaggtgtggggagggggtgtcccagtatggtctggggacttttctccaggatctgtgtggagaccaccttacctgggactggatgcagatcacaaaggcgacaagtctcacagaatggttgctagcattttgtgtctcactaccttcagataaaactatttttagagagttcaatagggctggaaagatggttcagcagttaagagcaccagctgctcttccaggggaccaagttctccattcccagcacacatatggtagctcactaccatctgtacctccagttccagggcatccaatgcattcttctggtttctgctggcaccaggcacacacatagtaaacatgcatgcaaacatacatacgaacagacagacaaaacatgcatacacataaattaaaaattttaaaagaaggttaaataaattgctctttcattgtgtgttcctggcataaaagttgtctttcaaagccaggtgtggtggtacatgcctataatcccagcacccaagaaggacaatgagatcaagagttcaagaccagccttatacctagtatgttcttatttatttgagaccctgtgttgcatcactccctaaagtcatctcttacttgcaactcattaaagccatttgacttatggaagtagggactcggatgtctttagaagatattaatttaaagcagagcaagaggaaaatctcatgttatctggtcattgctttctaactgggatcaagctaatgtgagtgagggtgaatcatttgatagaggtttttgcaaatttatatctctgtttgtttggtccctattcctctcagcctttcatggctctgctagcttccttctctgctttgttgcagagtccagcacctcccacacatgagtactggctactggaatcccagccagggtgaaacatatgccttattgatggcacaccatgagaaattggggccttatgatcaagtttctcctgctatcaagaaacaatgcaagaagtgatagactggatgaaaaggcatgattaatttctaggcctagtcttgacattgaacttcaaaatatttgatggactttatatttgctgtggtagaggcctctatatatttttaagtttgatttgcgtgtgtgttgtacatatgtgtgtatgagtgccgtgcatgtgtacactcgtgtgtgtacatgtgtgccatgtgtttgtgtgggagtgcatgcatatgtggagagtctgtgtgtgtgtgatgtatgtgtgtgtattaatgtagtgagtgagtgtgcacgtgtgtgtgtgtgtgtgtgtgtgggtgtaagagagggaggaatgaagtgacatgccatgtgcacatgaggaactgaaaggacaactgtgtgaagttggttctctctttctatctctgctgtgtttctgggcaagcatttttaccacataggctgtcttgccagccctgaagactaccattgaagatttagctgaaaggtagaaattatagtataataactatcatttcaattttttttaaactttttgagtaactgtttaaaaatttaaagatttttttaactttgatttcacttttgtcttgatttaagatatctgtcatcctaagccatctgtcattcaaatctcgggctctgtgaagacgttgctaatatgtacattaggaaactgggtatcccttctaccacccagaaggccctgtgcaaagagacagagaacaaagagacggaaagcaaagagatggagagcaaagcgaccttccactttgggaagcgccactcaggtgtagcttattcaattcacaaatttaataggttgctgattttctatgttgccttaaaatattcttacattctttaagagaccattttattaaatgtattaattataagggttaaaaacatcatctgagagataattactgtgttttaaattgttttctttgccagtaggtgtttattagttgaaatacagaaaatgtctaggaaaagtgtgggctttggatttaatggtcttattgtcaaatcttgatattctctctctctctctccctctccctctctctctccctctccctcccccacttttcccccctctctctttcttgacaggggactcttgctctatagcctaatgtgactttgaacttgtgataacttcttagcctcagtcttaagtactgggattgtgggtttcccccacaatggcccggcttgctggtttcttcatatgtggctcttaatcacagttagctcgcctctccgtttctgttttcttgtttgtaaaacaagaatcggaacataaagatttactttgatgagtctggcaggcttaacgatggtgacagctcactgctctgcagttttgctgatcttatcgtggtcacatttctaggaggccaccttgatttttttcccctctgataacatataccaaatagttgtcacatttcatatttaaaaatgaagttgctgggaccactgtcttccccatctgtttgagttaggtatcatttttgtgttctcacaacttaacaaatgggaagcaatttactctgtggtgctgcttggtaaatcactttctcactttcaagatatttttcagtcttgtggatgagaggtcttgacaatagtcattaaagatatgatagcattttccacaagcacaaggacatgcgcccatgtctctttgctgagctctggtctgggtagactaattttgacattcttttcttctatgtctaccctgaagtttcactagaggaagttactccctcccagtactggatcagcttaggccaaagtccaaacgctagtgtatgaaaaccatcttggtcatctactcgtctaaagacacagtagaatgagctaggtgtgagctggcactgggtgtagtaacacacctgtagtgacagaggtggcaggaggcaagagaatcaccgtgggtttgaggtctgcctaggctcagagcaacacgctgctcaaaaatacacaaccccctgcagctcagtgggcagaacacttgcctagcatgggcagaagagcctggatttcatcgtgagcactgcataaaccaatgtggtaatgtactagggaagtagtggccagaggaggaggtcaaggtcaggctactgaggtgattgtaaagcacttgccagggaatcctgaagacctgacatctatattcccagaacccaaagctgaataaaagaacagactttcaaaacttatggcacatggacaacacacatacacacacacacacacacacacacaccacacacacaggtgatggtgatggtgatgatgataatgatgatgtgatgataataagtttaaaaacatatttgttaagggtgatgagatggctaagtgaataatggaggagtctgctcagaaggtctggtgatctgaggttgaccctctaaacctctggagagacccaacgccatacaattgtcctctgagctccacatttgaaacttggcattcatgatcacacatacttgtcttgcacaaacagggacagacaaacaatttgttgttgtcgttttgtgtttgcttgtttgttttgaaacaaggtttttctgagtggtcctggctgtcctagaactc

SEQ ID NO: 857 - DNA, 1323 bp, Mus musculus
ctggtgaagtgagggggtgcggcgtggaagaaacctccggggtcgcgagcagtagctgtctcctcgtagagaagcgtcgaggcaccgcaagagttcgcggagcgcggctgcggagcgcagcgcccgcaccgcgcgatgccaggcctcctcgtgtgagctgacccgacagggccccgagctacctgtgccctctcccccccccccggctttctttcgggggacactcacacctcctttgcctgagctccgcggccgcccctcgcggcccccctcgctctctgctcgctcctggccgccgccaccaaccccgcggagggatgaccctctccggcagcggcagcgccagcgatatgtccggccagacggtgctgacggccgaggacgtggacatcgatgtggtgggcgagggcgacgacgggctggaggagaaggacagcgacgccgggtgcgacagccccgcggggcctccggacctgcgcctggacgaggcggacgaagggccaccggtgagcgctcatcacggccagtctcaaccgcaagccctggcactgcccaccgaggcgaccgggccggggaacgacacgggagctccggaggccgacggctgcaagggcggcgaggacgcggtgacaggcggcggtgggcccggcgcgggcagcggggcgacgggaggtctgaccccgaacaagcccaagaacagcctggtgaagccaccctactcttacatcgcgctcatcaccatggccatcctgcagagcccgcagaagaagctgaccctgagcggcatctgcgagttcatcagcaaccgttttccgtactaccgggagaagttccccgcctggcagaacagcatccgccacaacctgtcgctcaacgactgcttcgtcaagatcccccgcgagccgggcaacccgggcaagggcaactactggaccctggacccccagtccgaggacatgttcgacaacggcagcttcctgcggcgccggaagcgcttcaagcgccaccagcaggagcacctgcgcgagcagacggcgctgatgatgcagagcttcggagcctacagcctggcggcggcggcgggcgcaagaccctacggccgtttttatttttttaagaaaataaaaagcaattcagtagatttagagctttgaactttcatatttttttgaaggttcactctgcgcagttttatctgagaaaaagaatgtataaagacgttgggagattttaaatccaaaaaaaatttttcaaaaaggcgaagtgtcattgtattataaaagtctgtttatatatgaatgaatatatatggtattctaaatg

SEQ ID NO: 858 - protein, 351 aa, Mus musculus
LSPRREASRHRKSSRSAAAERSARTARCQASSCELTRQGPELPVPSPPPPAFFRGTLTPPLPELRGRPSRPPSLSARSWPPPPTPRRDDPLRQRQRQRYVRPDGADGRGRGHRCGGRGRRRAGGEGQRRRVRQPRGASGPAPGRGGRRATGERSSRPVSTDGTAHRGDRAGERHGSSGGRRLQGRRGRGDRRRWARRGQRGDGRSDPEQAQEQPGEATLLLHRAHHHGHPAEPAEEADPERHLRVHQQPFSVLPGEVPRLAEQHPPQPVAQRLLRQDPPRAGQPGQGQLLDPGPPVRGHVRQRQLPAAPEALQAPPAGAPARADGADDAELRSLQPGGGGGRKTLRPFLFF

SEQ ID NO: 859 - DNA, 21437 bp, Homo sapiens
cttaactatgtgccaactctattctaagtgatttggatgtccttaatccttacaaaaaccccataaggaagatgccattatctccattttacaagtaaggatatgaggcacagagagtttaaggaacttacccaaggtcatataactggtaaaggacggaggccacagtgtgtcctggaaatgcattatagtcccataggtcaggggcatggagtgcaaaggaaactagaaggtatattggagccagattatggcacacctgaagtatcttactaaagggtttgggttttcttctacaagcaatgaggtagcattaaacagttttgcttttgttttgttttgtatgagacaaggtctctatctctcaggctaaagtgcagtggcaggatcatagatcactacagcctcaacctcctgggctcaatcaagcctcttgcctcagcctcccaagtagctgggaccatgagcatgcaccaccatgcccagctaactttttacttttttgtagagacagggtcttgttatgttttccagattggtctcaaactgctggctcaagcgatcctcctgcctcagcctcccaaagtgctggaattacaggcatgagccatcatgctcaatgtgcattaaatgtttttgatcagaggagtgactggcgtgctccaactgacatttaaggaaataatttgagtagtcatgtctatgactgaggaacaagggactagagagtgtttctccatctgtagtctcctcaattgatgataacaccatttcttctagacatgcaaatttcatatctgggagttactgtgaaatctttctcccttagcaatcagacacttagttccatccattttacttcttcagtcctctcaaagtcatcatcatctcctcttctccagtctcactgccaataatttaaatcataccttcttcatctcttactaagataacgaaatagcctccttgctatctccagtcttttactccctcagtttatccttcacattcccgcaaagaatagttccaaaattttatttcaatcatgccaatcagttaaagactttactggcttcttaataactttgggctcttcagcccagtattcaagagtctttattattttactctggccattcccttatctcatttcagttaaaccaaactatatgctgctcctcgtgtcttgcataaatctgtgtctttactcgtgctgtgttctctttcttttcccagaactctgttcctctttttctttacctaactgctgcttatcattcacaacagctcaaatattatttccttttttttttttgagacggagtctcgctctgtagcccaggctggagtgcattggggcaatctctgctcactgcaagctccgccccccgggttcacgccattctcctgcctcagcctcccgaatagctgggactacaggcgccggccaccacgcccggctaattttttgtattttcagtagagacggggtttcactgtggtctcgatctcctgacctcgtgacccgcccgcctcggcctcctaaagtgctgggattacaagcgtgagccaccgcgccggacagttcaagtattatttcttagggaaaccttcctacccacctattctctttcccaggcagagttagttatgtttcttttgcgctcctgtaacattctatcatatatttataactcatcacactacattttagctatggacttccctgaataagtcccccattagagtgagaatgtgtcttactgatcgggttattcaagcaatatttattgagccacacctccacccctacaccactagtacttggctggaggctagggatacaacagtgaacagataaaaattcctgcccttctggaattaacattctaaaggtggaatctatcttcttactcacctttgtggttccagtgtctggcccttgatgaatacgataaggttagaaaaacagctgggtctaacaactagccttttgaatattttcttttcaaaggatcttttcctttatctacgttcccttttaaatttcttccatgtgtttgttagtcaaatacttccatgtagtctaaatgtactatacctagacaaaatgtctaagcaaatttcaatttttacatttcccttctctcttcttccatccctttctgtttccttatcatacatctattgtccatttcccttgagaccaagtactttctggctgtccagaagtaccattaggcatccaacttagcactttcttttcccaaagtatcccgggttctaacttacttctccccaatctcccctgaaaacccctaaagtcagaggtagctggtcagtagcatcttccgtattgaaggcttcacactttctctatccctacccagtgagaaaggccctcctctgcgctgtttccccttgccatggcacctatcaacctgcatgacaaacactgattctcttgcctggttcttccttaaggaaccttgggtttaattcttcttttcattcctggtactttccaggtctacaacagttcaataaattactaataaggaataaatgagtaaataaatatatattgtatacttatatatcctctccccctgaattcagctgtgggtatgacttaaatccaagaaattttggattaaaatgagagttaccaaaaaaggcagctttgacccaaggaaaacttgtttctttaaaaatgttagaagaatttaaatttttaaaatgtgttttggcctggcaggatggttcacacctttaatcccagcactttgagaggctgaggtgggaggatcgtttgaggccaagagcttgagactagcctgggcaacagagcgagatcccatctctacaaaaaataaaaataaaaaattacctgggtgtggtggtgtgcatctgtactcccagctactcgagaggctaaggcaggaggatcacttgagcccaggaggtcgagggctgcagccatctacaattgcaccactgtactccagcctgagacacagagtgagaccctgtctcaaagaaaaacaaaaaaatgtgtttcgatatccgcgatccatgtcacatctgttagtgtacctttagtacatgacttctgcattgtttgctaactgacattctgtgtgaataaagcgtgtatcacaatggtgtttccgtatgttatccaagtgggtcctttccccaggatgtgagtgagcctttggcatggtctttttaagattttgccaagggaagactgggctggaactaaggagctaacataccattgaaatcaaatatcccgttgggtgcactggagggtagagaagaggggattcctgcactcacgctaaatgataaacttttccaagggcagggtcgtgagaggtcttccaggtcacctagtgttctgagtcatgcagaagtaggaaatggacacaatactccccgcagagaatccttcccacaggactgatcctgtcccttcctcccctcccccgccccacacaaggcggaatccccacgcagtgcactgcaggcgcggtggccactgcccctagaaccagatctctcccccagtcccgtcctctccaagctccagatatgtcaaggattcttaagcaggggttttccaatctgtcccttgaggaactacccctgaggcaaggcgggcaggcccaagctgcgatgtggagaattcgatgtccgagcgacctcctcggaggagtgggtcgagttaaatataaccgcgcgaatggaatggcgctaaaaataaggcagcagctggcctgtccacagccctgtcccgggaggggcgggggccccagtggtcttgggcaggaaggccgcgtccggcccaggggcgagaaggctgcggcgtccgcagccagggctggaaggcctgggaggccgcgctctgtgggccccggggcctccattcgggctgggtcgcgggcctggacggggactgtccagaggcatccgaaagccaggccaacttgcctggacgtaacaagacggaagggctgggcgctgaggtcctgccagcccggccgccagagggagctgagcgccagaggaggacaagccgaacccttcaggaggccgggcgtctccggagaccgaagcgccggaggacccgaggaggtctgccccgcgcgctgctctggagactcccggggcgggtggcgctcggcctttccgctcccttccttcccacaagtcccttcccgcgcgcgccccacggccctgcccgccctcccgcgtcagcgccccaaccgtcaagccagcaattgaaacgtttccaaaacggtctatttatttgctcccaataaatcgatcggcggtgattaaagaatcgatgtggcctgggtgggcgagtcgcttgaggggagggattgggggctttcgcccggcgcctgcagggaggccgagggcgggcgcgggcctgagggaggcgtgtcccgcccgggccacacccgaggacccgacacctgggctggcaggccccggcaggcagcgttccctccggcggagaggggcgcgcgcccgccgcctgctttcctcggcccctctcgcctttctcgcgcgccggggaggctgtggccgccagtggctgcggagctgctcagaggcttttgttgctcctcggccggctgaatggggattttgtaaagcgggacagataaaaatgagcagcatcatattgtttgacagaatgatctcgcatgatgaagtgtcggctccgaagggggtgaaaatggtgaattcctaaaaacccagccctgggctcctcctcgagctgccggtagcctggagggacccagcggacagccgggcctggccgcatcgctccaaacggtgtcagaaagactccggctttcaatgccaagtcatttttaagccccgatcctgtccaggacctttctcctcgtggatgaaaagaacaattttcgagagaaaggctcgtttttattaaatccgacatgctgctgataactccatgctaatgtgaaataattaacataatagccataattaaaagcacgctaacaatgccataaatttatcacacaattttactagctttctgcccctaactgctctctcatcgttaattaaacgtgttgccttttacagaatggatgtttatatatttccaatataaataaattcgaaaccatcctctctctcttcctctttctctcctcctttccttttggtctctcgccatttacaggcacgccttggcgtggaccctgagtggcagacatcttgaaaataaatgaagttttgagatgcaaatccaaacaagaacattaaaatagcctctttttttccaccccgaaaagatccggagaggtatacaagggggtagtggtgggtaagagagttgaaaatcccccgctttgggaaatggaagtaatctgggtgggttggggccttgggtaccacctctgccctttcccaccttccttggtggcggccatccagacaaagaggccggtaatagtttaacaaatctatgaagattgtcaagaagcagcagactttgattgttgcgggcgcgggggtgttggggagaaaggaggggaatttttctaatagtcccacccacgttttgctccctcttggacaaagagtaactactcttggtgggggacgcgcccttcactccgcggaacctggtcccaactccccgtattgtaagaaaagtgcacccgcgcgcgggcatgatgattctatctcacatcgcgccaacgacttattcaagccactggcactgtctctgacttaaaagaggagaaaagaggcatatgggttcacttgggcctggtgaggggtaggtgggcaattcccgccttccgcactctaaccgtgcccctcctccagtgttgaccacctaagaacccaaaatgagctgtaattaatttccctttctccatcataaatttttctatccatttcttcccccccatccccccactggacgcacacactaaatctcccctcccctggagacgtctcaatttccttcctatcgatccggactccattcttcttgcctcctgttgctagaacctagatccccactccccgcacccctcattcccaccgcgtccaggtggctttcccagcggggtaccatgtactctgcccgctccagaggaaccgaaggggtttcattccattctcctttggttgaaacatttcaaacatttgagcaggtgaggcagctggctgccatcttcctttttaaatctctcctgggaagttcgcttgttgagactcaaagagtcactcaaactcataattgcgtgtgtgtgtctactcattctccctctatctctccaataaccctttgagactcagaaactttttatccacatacaccctttatcacattttcttccccccactacatgtgtctcactttctctctgtatctgtctcgcttcttccgtctctgtcctacagcttggcggtaactgacgacctgtgagcttttagctgcaaactgcaactacgcggcaaacaatttatttagcccgacatctagccggtctccggcaggaccctgcaccgcgtcgggatcggacccttccgctggggcggcctcctgcgtcaaggccagcaggaaccttcctgtcgccctccccggccgccgcttcgcctccttcccgcccccggaggttgtgcaggcgctatggtccgcctggagggagaaagccggcggccggttcctgagccgagagcggccgcggaaaaatcctctgcctccgctggaaatcgatattaggccggcgcgggcgcgggacgtcggggccgcagccagtaggttgtgcacgtctcatcatttagctaatcgagtcgaaaagtttctgtaagggccggacccagcatcagatggtaacactgattgaacaagagattagcacaatagatctctaaccgaggggaagcgttgcttttcacgctacgcgccgtaattaatggtatgaatcaattaatttgacttttattgtgtcgaaggaaaaaagcgcaacaaatggaaccggcagctgggagttgttcgtcctccacccccttccccagggaggttccaaggagacaccggggaatggacggatcaggctgggccgtggcagagggagggtaggaggcagcgaccagcagcgtggagggagtccagagagctagcctctgcggacggcggaatcgaaattaggctcatttggagactacttcgagaccggtgaggggagccctgtagccaccatcctccggcgcgcatccacacatactagtccacgcgggcccagccaccaaggccgcggcagggccagcgctgcgccccgggcccctgcctttagggctgggcaacccaagcagagcaaaggaggttcctgaatgtgtaaatttccgctttttagctttttttttttttttttttggaccttccgacacttcggttgctgaggcagttgcagacgcgacctctgcagtcctgggcgatggccagccagctcagctcgggtcggtttcgcggaaagctgtctagacggcattgtaaacggttcggagcctgcgggccacaaagctgtggagctacggaaatcaactctgagatgcgttttagggccgtgtgcaacctcgggatcatttagataaagaaaaactgtggaggttggcgggcgtctcaggatagtgtcaccaccccctaccctgctcccagcctcagatgagtagtgttatatcctgggaaactgtctaatggggatgaaagtcaatctgtgtgtctcaatgcctgtaatgaagcaagtttacagatttttaaatttttatttttattttattgaattatttttggtgtgtctaggccaaggaaagaggagatcgtgggtggggaaacagactgagggaatcagaagcaccactgtccatccggaattaaatccacatcccagcatcttctgcaaatatttcactaattatttcctctcggaactcctcccctcgtgctccttcctctggtgaggccggcgctcccctcccaggccgcagcggacagacagggattgggttccgtgtgcctgccacaccaggcaggctcttgcggctcccaactaggcggcctaaatgagggaggaaagaggaggcgcatcgctgattcaccgcgtcaagagcactgactttccttggaggtgtgaggtccacgcaccccagccacgcacttgggggtcggtttgcggtgcctccccctccagtcccagtgaaatccccacagtttttcctactatcactgacttgccttgcactccgcgtgcattggccacacatcctcgcctcctccacccgctccgccgccggttttcttggaagttaaatcttggaggatttgtccacaccttaagagaagaaaatccacgttagctggcagcaacggagatcccagcatgctggcatgcccaagtctgcccaggttcccccaaggccatgcccgccgcccgggaagtcactgcccgcacccctcacgtttcttcagccgcccctgggcgctgcgtctaacctgaagacaccaggcctcttcccggatccactcgacttacccaggccgctgccaatcccagctccttccccagcgcctcatttccgattttttcatatgctaagtcgtttaacaactccaagtagccagttatggcttctttatttataggttccctgctattttacgtcgtttttatttctctcggcaactattctagtagattaatcaatagccattttctgaccttcgggaaccccagctgatgctttttgtggccgcacgaaaaaatacatacaggaaaacacgcccgcatcaagccgggaaagagcaggtaggacctgagtggtttggttgggggagggggaaaaagacatctcagcaggtgtcttccccggaatgagcactgaggccagaggggaatctgaaatctaattagcaggagggagccgggtgcgctgctcttactctttaaagctaaaaacaatgaaacaaaaagcaaaacagagactaagttttgctttttaaaacacgatatgggaacctcgttctaggtcgcccagtccctgtctaaggagtgtgacaaagtgggggggagaagggcggaagggagagggggcggggaaggcagggcagcgacagtcgcacagtcccgcggacgctcccaggcccacgccctgactcgctcacacccacccacactcacacccacccgctccctgggccccagggcccggatccagcctgggtgggggggtctccgggcgggccgcagcgccctccgtgccccggggatgctggcgcacagtgcggagcggagttgcgcgtctctcgtccctttgttgacaattccctgaaccaacttgagtttggccggctcggccgcggccctgacgtcacgcacggtcacgtggccccgcctcccgctggatctttaagtagaaagtaatctatcaggccagtccttaaaacgggactttcgactaccggggcttcggcgtccctgacacccagccccctgcccccccgctactgtccctgcccgcgccctcccgagctgctcggcgcccggcgtcccgcgcccgcctggaccgctcctgcgccccacgccagggccagaggccgaggaaggcgggctaagtgagggggcgcggcgtggagaaccgccggggccgggagcggtagcgagcgcctagtaccgagcgccagggacggcaggagttcgcggagcgcggccgctgggggcggacggcagagcccgcgccacgcgatgcggggccgccgagtgtgagctgagcccagcgggccccaagccacctgcggccccctcccctctccctgccccccatctttcgggggcactcaaaccctcttcccctgagctccgtggcagcccccgaacaccctcatcgcccgctgccccctccccgccgccgctaccaaccccgaggagggatgaccctctccggcggcggcagcgccagcgacatgtccggccagacggtgctgacggccgaggacgtggacatcgatgtggtgggcgagggcgacgacgggctggaagagaaggacagcgacgcaggttgcgatagccccgcggggccgccggagctgcgcctggacgaggcggacgaggtgcccccggcggcaccccatcacggacagcctcagccgccccaccagcagcccctgacattgcccaaggaggcggccggagccggggccggaccggggggcgacgtgggcgcgccggaggcggacggctgcaagggcggtgttggcggcgaggagggcggcgcgagcggcggcgggcctggcgcgggcagcggttcggcgggaggcctggccccgagcaagcccaagaacagcctagtgaagccgccttactcgtacatcgcgctcatcaccatggccatcctgcagagcccgcagaagaagctgaccctgagcggcatctgcgagttcatcagcaaccgcttcccctactacagggagaagttccccgcctggcagaacagcatccgccacaacctctcactcaacgactgcttcgtcaagatcccccgcgagccgggcaacccgggcaagggcaactactggaccctggacccgcagtccgaggacatgttcgacaacggcagcttcctgcggcgccggaaacgcttcaagcgccaccagcaggagcacctgcgcgagcagacggcgctcatgatgcagagcttcggcgcttacagcctggcggcggcggccggcgccgcgggaccctacggccgcccctacggcctgcaccctgcggcggcggccggtgcctattcgcacccggcagcggcggcggccgcggctgctgcggcggcgctccagtacccgtacgcgctgccgccggtggcaccggtgctgcctcccgctgtgccgctgctgccctcgggcgagctgggccgcaaagcggccgccttcggctcacagctcggcccgggcctgcagctgcagctcaatagcctgggcgccgccgcggccgctgcgggcacagcgggcgccgcgggcaccaccgcgtcgctcatcaagtccgagccaagcgcgcggccgtcgttcagcatcgagaacatcataggtgggggccccgcggctcctgggggctcggcggtgggcgctggggtcgccggcggcactgggggttcagggggcggcagcacggcgcagtcgtttctgcggccacccgggaccgtgcagtcggcagcgctcatggccacccaccaaccgctgtcgctgagccggacgactgccaccatcgcgcccattcttagcgtgccactctccggacagtttctgcagcccgcagcctcggccgccgccgctgctgcggccgccgctcaagccaaatggccggcgcaatagggacgcgccaatggccgggacccagggtccggcggcggcctcgagcaacaaatgcacctccaggctgcgcgccctgtcccaagcccggtcccggtcccgctgcccaatcctggactctgcctctccccaatttcctttcccctgagcccccaacgcctaccttccgcggcctccatcccctcgcgcacacctaagctggtcgagcaaactcaccgcgcgcccgccggggatagctttccatacaggtaaaaccgaaaaccgaattttccaaaaatgcaccccgacggcgcctgctcttagtaccgtggggatgggagggaaattctttgtatatatttgtaaaaaaattattgactttccttttggggtttttatttttttaagaaaaaacaaattccgtagatttagagctctgaactttcattttttttgaaggttcactctccgaagttttatctgagaaaagaatgtatagagacgttgggagattttaaatataaaaaattttcaaaaaggcaaaaagtgtcattctattataaaagtctgtttatatatgaatgaatatatatggtattctaaatgttattccatcgtgttgtacacaactttgtaaataaatttttaaaatgcccagcctagtgttttatttagttgtctgaagtaaatggcaagatttttaaatggtatttatttgccttttctcctccccagaaaatcaaggaatttcaagtaatggccttttcaaactttttaaattcataatttgagtgtaagaaaattttaattggagaaaggaaatagtatgcctaatttaaattgtgttactatttttcttttagttttcacataaaatcaggatgtgagtgatatcattcatatcaacccattaaatctaaatgaccagacatttctgtagataaagtaagctgtcatttaaaaaaagaaaccgaaacaacagcagtctttaaatttttttaaaaaatgactagacttgtatcttccacaatgaaaacttcccaaatgagagagttcttggtcatttcaattatcctttgaaaagtaagtaaattccaaacatccctctttttaacatttaaatcttagatttttgaaattatttcttttcattccttaagtggaagtggtaaatagacccagctggttttaaaatttatgttaaggcactttacattttgcagtgggattttatttatgttcatctgatagataatacatagttttgttttcataatattttcaaataagatatctcatttatatggcaataatcaatccacaacataattggatttctgaaggggtcctatagatgcttcctctccctccaacccaaagcctttctgaaggccaaggaatggtggccttaatacccttttaaaaacagctgaacatcacctctctccccttttttttctttaccttaggctaggttagtgtgaaatgcgacatcatagggcaggaatggggaaggtccttgtagattatttttaatttgcatttcagctgttaaaaacttttaaaagaaagtatgaaggtagaaatgaaacatcttgatgtggaaggctggttctcaccaccatcagcatatcctcaaaaggcatcaattctaattattttgtaattaatttagctgttacaattacttgtgcgaaatcgcttttaaaaactggagcgagtagcagtgctgtcggctcggccctgcgcgcgtccttttggttaatcccggccagtccccggtgttgtcgtccactttgcctccctggtggtggagatgcctccccgtctcggatcccacctcatttctccgctgtcgacgtgggctgggggtcgctttgaaagacacttccttgcaaatacccaatctgttttcctggtaaacggtaaacattattgtgtcttgagtaaacattccttcgggatcagggtcctaaaataaaacaagctgccgggggtgagatagtttaacttgataaacaagaacctgataaccaccgccgagagaggagcaatggtaaccttcaccgagaggagattatggaccacacggtctccgggcgggtcccttctaatctccttttacaaggaaaactaaacggatctaattttgtttgtgtgttgcagctataaaagtaacaagttgtttcacagttgtgtctggctaatcggtttttacacaaacagcaaatggtacatgatttgtgcaaacacatagagaggttatttctaaatttagctgacagcccctgggaaaagggaaaggcagggcttcttgaattcacttttagcctcaagaagctgctgatccaaggcttctaaatgacattggataacaggggcctcattccatccctgatcctttgttacttataaaattactcgctcatatttccgcgcatagcagcaataccggccgagcctgcgccagcagcgtgacactcagccacaagccaccgccggagactcgcagggctttttccagcgctacattcattaggcggcggggtgaacgggagagacctgccggcaactttccttccagccagttcttacccttgaacgacggcctaaagatggtccccttcctttatgtcgtggaaggcaggaaactctcggacccagaccctcaagctgccagcggttgtttaaagtcctggcagatgtcaggaagatgggcccggccgtcgcaccctcaaaagctctttttcgtttaagctttttaaacctcgaagatttagcacaaaatgggaaatgcaaatatcatagacaatgatcgcaagcacttagtggtggggctgggggaagcctgaaacccttgtttgatgttatggaacgcaggcacctgcgacaaacggcactggaaacagctctctcgttgagatttaaagtcaacactactgatatccactttttattccacttaagaaaaaaaaactaaaggaaggggggcagatttatttgcaataaaagaagaaagcgggttgatttttatggggaagattttagctttcggctacacacgcatttagacgtttctactttctctagcactcattcctagaaaaatcaatccagccctgaggcctgtggcccctagagcgttctcaggaccaaggtctgagttgggaccgcccgtatctagttcctcggaggggtggatctggatgtccggggaaaggcgaatgaagagtagagcaaaacatgtgccggctgttgagggctgtcgatgcgatggcagatgtggcctgtagggggcgacgagcagacggaaaacttcgcggtttgtctggaatggtccagccccagccccggacgcctctccttccctcccaggctctgagcctcctgacatccttgcttattctcaggccccggaagcctaggtcgaatctcgagaagctgatttcctcctttcccccgcctgtgtcctgggaggaacagagtcccgaggggagtttgtcctaaagattgggaggcaataaagtttagtgatgaggaaacattgacttggaagcaattaagagttatatttgaggttatttatttcacatggtttatagggtgagtcttggtagtgagaacatgaaaggctgacatgagtgtgtgagaggtgggtatttttaacgtgagtcccttgagaaactgtcctgaggggtatgtgatctgaaagaaagtgggttccagagccttgtgtccccggactccacctgtgtccccggtggtacaagctgcagaataaagtagtgaagggaggaggttggaagggcattctgaaagtgccaggctgaaccttgtggggagccgtctgtttcaagggaggaggcgacaggaagaagcgggatgagaaaggccttgcagaaggcgttccaacagggattaggcatttcctaactgtgactttggacaagctgcttggtttctttcaatgactgcatttcctcgaccctacagtgagaatgagtctgcctgtcacctgggcttacagaattaggtgagttggtgtcagtgaaaaatgtcttataaactgtaaagtgctgggggcgtgtacagtgtgttttttaatggcttctgcacgaagaaacaactctgttctaagcactggtacacggccaaatacattggctcggttctgaaccatttgattttaggtatgaaaggtggatttttctaagaggggttgcagaacccatcccaggaaactcccaccccagaagaggcttttaaaaggtggagcttcctcctggtctgtaggcctttcactatgcctgcggagaagctctcggtgcccacccatccttcagcctgcacccccagctccaggggcagggcatacgtctctcttctctctggcagagcggcctactctgctgtttgcccctatgcttccactatccgaggcaagtggggaaatctgagtccaccgctgacagactcccattagtgcaagatgcggcctgggaggcgaattaaaggtaaccagatcccaaactcacttaaaagaccaccctccccttgctgccctccaacagttggcagagttacacccagagccaacttctctcttcgccactccccctccttgccctctgaggaatgtacaagccattctttgctccctggggtacacaaaacaaaatttgaaaagaaatgtaaaactagccagggtgtctgtaagaaagcataaccatctcatttttatttcccgaagtgccgtcatatattagaattttcctaaatgcagaattaaattggtcccctcccccattttaacataaaactgctacctaaggctcttctccagatcatttgtgcttttgcacacagctccatcccatcaggggtgaggcggggaagaagagggacaccttcactctcttgcctgagtcctctggtgctgaattccgaacccgtcttcagaaaaacagtcctagaatatcggcattagaagtggcctccggggtcaccctggaggccctcttttcacacaggcccacccagaaggttctgggacttacccagggtcactcagcagcccaagtgcaagctatggaagtactcggaggaggaaaaagtgtgctttacccagcaagaaggcgccacttgaggaaacaaaaacagcagactctggggcaaggaagattggggagggttgagaggagaagggaaagacagacacagacgcgccgggccggtggaactcagctccgggaaggctgtggacctggaccctggggctccccgctgcctgggcgcctctagcccggcgatgagtggttctgcggggaccgacggccccatttccttcttgcctcgtgatgtgggagggaagaaagaaggcggcaactgcaggcccgaagctcccctcgcccagcggcccaaccacagtgctgtcgtgtcggggatcggtccccaagggagcccccaaccccctgcccacgccgagatcacccccgtgccaacctcgagggctcggcctgcgggactccagctgcccctgcctggagggagggaagggagaagagaatacgaattaattacgaaggaaacccaggtgtgaaaggcacccgccgcggagctgggcgtgcagcggggcgcgcggtgggacctctgctcccgtccccgtcccgcggctactcagttgcccgctcatgggaggctcgcgacggaaaataaatcccctcagagtgaacctgggaggccgagaggacccagcctgggatctctgggggaaataggggcaagtttaccacggtttaattaagccacagccctagcacgaggaccccggcgacccatccgggctgggggatggactggagtgccccccaccccaggccgcgaaccggcagcgagaagcacactctccgccatccccggccccgccgcttccgcctctgcggactccgcgtttgccatgctccttcccggggtccagggaccggagctgcggtgcacgtcttattgaaggggagagctttggttcttttcctccctgcatccctcccactttcctctcaacagatagtaagcaagactcaattttctccaaaaaagcccgttacccctttctgcaaggggcgcatgcctaggttcacagggagctctcttgtcagccccagaacaaccctaaactccaaatgttctgtttgctctcgaggtacccctgggatgcagcgtctcctccgcgaagccttcctgagcctccctgcccagaccagttgctccttcttgaagctcaccgtgccaattaatgagccattgtcattagtgttgccctctgagttcctggtgagttcctgaccgtctagcattgctgagcacaaaggggacgatctaaattatttgtctgatgaataacagcttcgcaccacgggagcggggataggggatcttgaaggctgttaacttatcaaatcaagtctttctcaagagtttggggaactgttttcttcccatttctttccttctttataatgaatgctttttataaacacttaatttttttaagtgaatgaattttaagtctttattagaggtctaaaaagcgtaagacccgtcaactatgtatttttctggcatgttttctcagtcattgtgaaattagttgaaaacttctcccagcctgaaataccagtagctggttccacctcccaccctaatgtagaaacctcttcagaacacctcggttttcagccagcatctgtttcaatttttccagtggaagaggaagaggaaccactacctcacaaaacaatccattccacttaggggcatcgttatttgttcaagggtctttcttttctagaactcctttatttccttagtaaaggatagtggatttgagagtcatttgctcagattttcatatgaaagatggtcgtatttccatgtgttgggtttctttatctagaaacacaaataattcactgtgctttagctcccacattaaaactactatttgttggggggaaactgagcaaaagctaaagttttgagaaagcctctggattctgtattcattacacacaatccaggatggtccacaggcctccttttgagacccacttggagagccttgggttcagactacactggtggtaaaactcttgtggaatggttgtaagagttttgtgttcctggtttttttaaccagataaaaagcttttttttttttttattctttttaccattttgtttttataagctaagataaaaagtattttttaaaaagttaaatcatttaattcatctttcattgctgtattccttggcataaaagttatgtcttacctatattagtcatctaaaccactcatcatataaaactaggaacttagatgtcttctctggaaaatattcatgtagattccactgtttaattagagaagcagaaagaaggaaaatcccagatatttggccattgccttccaattggaatcaagataatgtgttcttttgcattacccatctaatgcattttctggcaaatttatatcgcagtttgtgtggttcccatttgatttagtctttatatagctctgttagcttccttctttgccattgttacagattatactggtaaaccttctttcaaattctaccagcttgcaaatgtaaatgttggttacaagagcaaggtagtttcaagatcagcacaaattaatcacaaccactgtgaaacatctgctttattgatggtacttcaacagcatcactttccacatatatcaggaattatgactttatgataaagttgctcttgttcctagagggaatcaagtgcaagagttaatagactggattaaaagacaagactaattgctagtcctagtcctgacattgaatttagaagcccacatacagtaaagattactagtgaaaatttagctgagagaaggaaaggaattatagtataataactatcatttcaaagttttagctttttgagtaactgttttaaaaatttagtttttttaccttgattttacttttatcttgatttaagatatctgtcattcaaacctccagcagtttgagaacttatttactctaatactgatactatatactacaggtcagggtaagggattgaattattctctgctaccaccacctatgaggtccagtgaataatttgaaaaaggcttacaggagattgtgagcaggaatccgggctcaactttgggaactggtattctagtgcagtatattcaaaatacatacttaatgggtcacttttttttgttactttaaaataaaatattcttacactaaataagatgaagtttgagaagcatattattagttgtgagagctaaacacttatgatgtgagagatatctatattgtatttttcaaactgattcccttacttcttatttgagacacaaaatgatattctagaaggagcataggctttggaattgataatcttagggtcaaatcctggttctgccatttcttaactatgtgatcttgattaaagttactcagcctctctgaatctatgtttccttacctacaaaatggggatcagaatatgaagatttactatcacgtatttggagtgctcaaatgtgggggctattagtactacacagttttgctgttacatagtggtcatattttcatgaggctaccttaatttttactctgatatcatataccaaatagttgccacatttcatatttaaaaatgaagtcattgagaccactgtcccttccatctgtttgagctaggcatcatttttgtgttctcacaacttaacgaatgtgagacaatttgctctgtagtgttgcttggtaaatcactttttcactttcagggtatttttcagtcttgtggatgagaggtcttgacaatagtcattaaagatatgatagcattttcacaagaacaaggacatgtgccttatgtctctttgctgagatccagtctgggtggactaattttaacatttttctagatctacactaatatttcactaggagaagtcactatctgcctaggtcagatctgattaagagctagtaaagaccacctcagttatactctctggtaatggaaggatgtgatgttgtgtagttcaaggaggatgggatagaagtcaaccggtttgggtttgctggatggtgactttggttaagtcacttgaaactccaaactgcagattattattatctagtggagacatattacatatctgtttagcttactcccattaaaccaaacatcatttaaaaagcagtgttacagctcttttagaattagtctagcaggttttccagctctcaccagaaaactaaagaaaaaataaataaaaaaaataagagagagagagaatgaaaatccacttaaatgtgaagctaccctgaattctacttaatgggcatgagatgcagggaagtgaggcaagggtggcacaaattgctgtttccatagttagtgtcagttctcttatccttttctttctttctttctttctttttttttttttttgagatggagtttcgctcttgtggcccaggctggagtgcaatggcgcgatctcggctcactgcaacctccgcctcccaggttcaagcacttctcctgcctcagcctcccaattagctgggattacaggcacccaccaccaagcctggccagttttttgaattttttagtagagatggggtttcaccatattggctaggctggtctcgaactcctgacctcaggtgatccacctgcctcagcctcccaaagtgctggggttacaggtgtgaaccactgcactcggctctcttatactttttacaatgtgggtatcttgctgccaaaagtgttggtgtttaaatatactaccctcaatttttgtgcaatatagcctctaaatgcaagtcagctatttctttttttctttttccttccttcccttcccttccctctttctttctttctttcttctttcttttcttttctttctttctttctttcttt

SEQ ID NO: 860 - DNA, 1437 bp, Homo sapiens
atgaccctctccggcggcggcagcgccagcgacatgtccggccagacggtgctgacggccgaggacgtggacatcgatgtggtgggcgagggcgacgacgggctggaagagaaggacagcgacgcaggttgcgatagccccgcggggccgccggagctgcgcctggacgaggcggacgaggtgcccccggcggcaccccatcacggacagcctcagccgccccaccagcagcccctgacattgcccaaggaggcggccggagccggggccggaccggggggcgacgtgggcgcgccggaggcggacggctgcaagggcggtgttggcggcgaggagggcggcgcgagcggcggcgggcctggcgcgggcagcggttcggcgggaggcctggccccgagcaagcccaagaacagcctagtgaagccgccttactcgtacatcgcgctcatcaccatggccatcctgcagagcccgcagaagaagctgaccctgagcggcatctgcgagttcatcagcaaccgcttcccctactacagggagaagttccccgcctggcagaacagcatccgccacaacctctcactcaacgactgcttcgtcaagatcccccgcgagccgggcaacccgggcaagggcaactactggaccctggacccgcagtccgaggacatgttcgacaacggcagcttcctgcggcgccggaaacgcttcaagcgccaccagcaggagcacctgcgcgagcagacggcgctcatgatgcagagcttcggcgcttacagcctggcggcggcggccggcgccgcgggaccctacggccgcccctacggcctgcaccctgcggcggcggccggtgcctattcgcacccggcagcggcggcggccgcggctgctgcggcggcgctccagtacccgtacgcgctgccgccggtggcaccggtgctgcctcccgctgtgccgctgctgccctcgggcgagctgggccgcaaagcggccgccttcggctcacagctcggcccgggcctgcagctgcagctcaatagcctgggcgccgccgcggccgctgcgggcacagcgggcgccgcgggcaccaccgcgtcgctcatcaagtccgagccaagcgcgcggccgtcgttcagcatcgagaacatcataggtgggggccccgcggctcctgggggctcggcggtgggcgctggggtcgccggcggcactgggggttcagggggcggcagcacggcgcagtcgtttctgcggccacccgggaccgtgcagtcggcagcgctcatggccacccaccaaccgctgtcgctgagccggacgactgccaccatcgcgcccattcttagcgtgccactctccggacagtttctgcagcccgcagcctcggccgccgccgctgctgcggccgccgctcaagccaaatggccggcgcaatag

SEQ ID NO: 861 - protein, 478 aa, Homo sapiens
MTLSGGGSASDMSGQTVLTAEDVDIDVVGEGDDGLEEKDSDAGCDSPAGPPELRLDEADEVPPAAPHHGQPQPPHQQPLTLPKEAAGAGAGPGGDVGAPEADGCKGGVGGEEGGASGGGPGAGSGSAGGLAPSKPKNSLVKPPYSYIALITMAILQSPQKKLTLSGICEFISNRFPYYREKFPAWQNSIRHNLSLNDCFVKIPREPGNPGKGNYWTLDPQSEDMFDNGSFLRRRKRFKRHQQEHLREQTALMMQSFGAYSLAAAAGAAGPYGRPYGLHPAAAAGAYSHPAAAAAAAAAAALQYPYALPPVAPVLPPAVPLLPSGELGRKAAAFGSQLGPGLQLQLNSLGAAAAAAGTAGAAGTTASLIKSEPSARPSFSIENIIGGGPAAPGGSAVGAGVAGGTGGSGGGSTAQSFLRPPGTVQSAALMATHQPLSLSRTTATIAPILSVPLSGQFLQPAASAAAAAAAAAQAKWPAQ

SEQ ID NO: 862 - DNA, 62130 bp, Mus musculus
  misc_feature (1)...(62130): n = A,T,C or G
aaataagtctaatattagacttatttctcttagactcccatgattttgtaccatattacctgaattttattattttgcagcatgtcatactgtgtatccacccatctcctggttatctgctgacagacatttaccgtttctgcctcttcagagcctggcctcttagtgaaatcctgtctcaagatagaaacttgtttaaggggagggagggctgatgatgtagctcagtggtagagtacttgtctagtacttctgaggccctatgctcagtactcaataatgctatatataatgcatctggctgcatttattgatttttgcatttgtctgtggacacaaacagttgagctgatgttgctctttggtattctcttagagaaatgctcagaagtagacgtgcctttattggaatttattttggtggcatcatggaagttctgattttatttaggggcctgggtttgtagcacacacttgccaatctgtccacagctggattatgtggaacactgcttcagtgaggtttcagaagtcatcatacctggctgggcactcatcagagaccctgataggtgatgaaacctgttacatactcctggaacagaacgacagggtcggaatggcagctagagccccattagttgcaacttcactctccccagttctgctcaagtgaaattggtcagatcccaaggtgaagacctgagaaggtctgagagggattctgagccaacaaaggcagatacaatttcactcaacataagttttgtacacacagccatattcagagatctgaaaagattgcatgtctgtttgttatcagagcattgaattctgggtaggaaggttaggtctgggtgagccgcactactgagtagtagatgtcctgtcctctgacttctgactctgtgttaggagaatgtgtggtaaaagtaattcacttactcctaggagcagcctcccgagcatgcatatctgggctgcaggatcagtggaggttgagtcaccagctgtggaatgctgtcttagactgtctgtcagtgaagccccaaccctgcccttcagtcaggaccaaagctgtgggaaagttctgactcattcacatttacacttgactcacagaaaacctctagcgtctcattttattttatccaaccaaatgttttgtgtgtgcctgcatgcgtgcgtgcgtgcgtgcgtgcgtgcgtgcatgtgcacattgtgagtgaaatatacaaatgatatttgaggttatttgctgagctcacttttgttgtctctggatatttactccagagctggtgccagggttgggtgggggttgtggggtaggggagctctcagcatggtagtgcaacggatgtgcatctgttagtgaagtgatgcttggaaggacgcatgccattttcatcagtcttcaagaatcctgtgcatgtactttccctgctaccttctgagtccctgccctcacacagcacgtgtatgcatacaggatttgcttgtgctgaagggggttgcatgttctcaggagatggatctgtaggaaaaaggccaattccttagtgggcacttgggctcctctggaacctgggccagacttctcccttagttttgtctgatctctgtatacttctgttcagcctcagtcagggttttatgctttgccattctgtcttcttgttctcttcctagttttcttgtttagagtatttcccataatcagcttgtattctcacatttcttgtgtcttcccatccctaaaggctccattcatgttctatccacttcctttgcagtggtcagagcattgcattctttccatgggccaggtattttgccagacatatctgtctgccatatatatctgttatctgtctatcacttacctatctatcatctgtatttatcttctacagaattaaaaaataaactaaacacttaggattatccttattgcaagagaaaattcatttgcagaaaattaaaagctgcttgaaccaaggtgttaaggttcttcttgtcctgaccaaattccccatgttggttcccctcagaatttttgggtttgactgttagcaccttctgtgctcactgacagcattctctttggtcttggtcaggtgtgttgtacatttggcaatcagtcactgtgcctcattaggaggtgtggctttgatgactattttactgtgttctgttcttcccactaagctgcatgcagactttacctgatgactctgcgtttgtgttatttaaagaggtgcaggagtcagtgaggtatttctctagctatattaacccagttaggcatttataccctaccataatgttttcttcaaaccatccatcctcgtcctctttttatactttgattccatagaaaatacagaccagacacactgtggctggggtttgtatcattttcctgccttgtccttcaccctcaaccaaaaagcagaaaaagtaaatggaatagccagtcaattgaagggttatctgttagatagaccaaggtttttgaccagagtgatagatgtaggcatgctgtagacctatgtggaacctcaccacaagatctcaaagtgtctcattaagttaattttacctcaggacagatgcctctgggtaccttttctagttaagaaataattaatgacttctaattataccacttgccacccagaactcacaactcacccatagttcctgttgacagccacacactagactgctctcccttttccagtggaaagatggttgaagtatggtcaaatttttgaccagatgcaaggtaaataacatagagtttgagcttgtcaagttctgtcaagactcactgggaagtgtgaccatatgtggaaatacaccacaggtaaggataggggcaattggcagaacttcaaatgggtctccagccttgagatgtagtttctagcgctctggggaaccatggttgaccctagaaggtaactatctaggaggggacactagtgaagacggagttctcttgtgttcaggccctacccagaaagttatgttgcagtgtctttagcttcctagtgtgggtgaagaacaattaggtgagctccagaggaagtgtggcttgctgttttatactcagctgggcagatgcacatattaaataaagatgggaatagggaaaaatttactctttgtaattttgttgagtattttatactagtgattttcaaactgtagatccttgttccttagtggaatgtgaaatctattttcagtcttcagcattttaaaagaatattagatggaagaaaatagggtagcattgaaactagtgaatggcacccagtgagggttagactctttttcctttttgcatttttggattgcagtctcactgcagatataaagagtgaacttgcagctgtgctgaaggaaatgggtatggagtagggaagagaagggtggtctcagctctaccggctgctgcagtaggctggagccttgaggtgctctgtatggcaccagtgccatctgctcagagctgtgactgcagttagtttaagacctgtgtgtgtgtgtgtgtgtgtgtgtgtgtgtgtgtgtgtgtgtgtgtggtggatgtgtttgctttgactgggtggaaccctgggtttgatctccagcctggaagaagaaagaagtgtaaccataaatattgatcataatttcttgactgagaaatgctggggtccctggagggaaatttttttcttccattttctctgactttcttatttaaatcttattttgaggcagcagccaacttatgttagatcgcagtagatgtgctggggactttcccagctcctcatctgtctgaattgcttgcggggtctcctaggtggtcttccacaaggctgcagggctgaggtagtcttcccttctgggtactgagtgttcagggaaccatgcaggaagcagagtgcccagctggtggtgttgatgagccatggttgtggtgccagcagtgggggccgtcccctcactctcattctccccctacctactaagaagtgacaggtttgtacctgagaatgccaagtggtcaaagtgtggtttccttcaggcaaagccaagggctttgacggcaagcaaggttctgtgaccttgttttcatgacattgttgaaataacattagtaaaaatttgtcaacttgtggcacaatatactttcccatatttgctttgccctctcccctgtgtatggacttgcacatttgtttgcacatgtacatgtgtgtgtagtccagaggccaacttcaggcatcattttccctaggctgtgcagtgagcaccatgggttcctctctgcccttctcctgtgcttgcctggaagctgggcactaccgtgctgttccatgggtgctggaaatctgaacggagctcctcgcgcttatgcagaagatacttccattggtagggagccctagagcccatccagtactttttcaccttgcagaacttgagtcttgagatcctagaaggtttgctcaaaactaggcaagacctggccatttgtctctccgggacaggctggcgcagagttttttgcagccttccctgtttttccgtaatatccactccttccagttttttcctatgtgctccttccccatcttcctggtccaggctgatgccatgctgggcgtcctttcttttcttcccgctcttttccagaacagttgtacacctatctccccttctcagttttgatgtttccaggctgggagctgctcctctcccaggtgacatccaagcccaagccttacactgtgccttcttgacgacacactccctactgccagttcttggcatcctactaagtgttcctccagatagtgaggctcctgtttgttttaatagctggaagtaagcctcaaggctttggtgaacatgctgtgttccctgtttgtctttggatctcttgcagcctgcatcttttccaggaggaatccagcaaggcattggacaaggaggtgtgctacttactggcagttgatccctggaatgtcgtaagccaggccttttcatgtgttgaaggaactgtgaatcctcaatattgtcaaagatttgaaagcctctactagggacagaatgtgtaaataaatgctaggctttattgttatgggacagatgcttcaagtactttagataagtgtctaggaagtgctgagtgagaccaggtatctgtccatcgtctcccttccacccctcccccagcaccatttagagacatggcctcattatgtaatccaggcttggcacttgccttggagttctggctgccttcaacctcatggttattctgccccctcttcctaagtgctgggatgacaggctgtgctgccaagcctggccctgcttcccctttctgcttatccacttctgccaccatagttttgacctcgaggagaactgtggagatggcttctctaaatcttatcatggcctctttaataacattatagatacattaatgctaattagtttaaaagagggaaagtaaagcaaaatggagctgcccagcatcttgatgcagtgtggcttttaggaagacacttactgactttaattaaacaaagtactgtttgctctgtcagagacctcctctttgactaaagcaggttctttgggaacaaggcagagccgacccattgacttggcattgatcatttgctcatccctagaagtttattgtaaatgaagcagcatttactgttgtgtggtattcctggaatcgctgctatagttagaagtaagtgattctgtgtgacaggaatggcatagagaaaagctataattctgactcgttgacagggaaaaatgcaagttttgtatttatattatgtcattctcttggctagaatccagcagctttacggtttcttgctgagctctcagcagaatgttacccatctcgaaacgaagtgctggggtctcgggagagacagagaaagtctttctgtaatgctgtgggtaggaggcactggtcgtgcaactggaagacagcagatggttttcctggcctgtgtgtgtgaagaccttaagaaagttccatgtccaggcaaggtaggcctgtgttgaggaagcagaacactgctattcctctagggtggctgccatgctggaggggtgggctggagcatagtcagggtggggcagttaatgactttgcagctcccgtttgtttgctacagggccttgctgtacagaacaggttaacctcaaacttactttgtagcctatgctagtctggaatttgtgagcctccaagcctcctgggtgctagattataggcctgtgccagcacacccagcttgatgggttctttttgacagtacctttagaagacttgcaatgacatcagtgtccgaggtggatgctagattgaaaactactaaacagccagagaagacagggtggtggcgactgaaggaaagggcaaggtccttgagtccggagctgcacattaggactgctgtccctcatactgattagcccaacatagctcagacttcctacagattgaagttccagtggtttactctgtcataatttgtgaagtcactttgtgcatattggggctcctccttgaccagaactgtatccataaccataatcagatgaacagaaattatggtcaaaatcaaaggtttcctgagagttgaattctgttttgtgatatttagctcctgccggtcctgtgaaataaatcctatttttatctcttcacttgtactgtgaatattgaggatgttaagtaacttgccagggaagccagattcaagtcattcaggtcactagaactccagcctttgtacttaaccttcagcagactattcctcagtgtgggaccaggattctgtttattctgcgttcttcccagcaggctcccagcctggagtattcgaaattatatatatgtattttttcattttctctgaatttgtcaacattgtattgctattttctgctttagaaaggtttttgattccttaaaataactcactgtaggttagatcttatctttttgaaagtcagtatttacaacagactggactctaactcaaagaggcatctgcctcccaagtgctggggttaaaaggcatctaccatggcacctggaaagatagtctctgcagtggaaatcacctaggacatgcagtgttttgtttagatttttatccttgatttagttatgactcagtctttttgctagacaaagctggcattggcctttggctcgggtacacttgatgatagcgttctggagcattagaactgtctagttcactttctgttttgccttccatctaaaattcagtagtctctgtatcccttatacaaatattaaaacttcaggagctatgtggattgtcatatagaaggtgctggaactttgcctgtttggaagtggttttgagttggctgtgtttagactcacaaaactgttttgtttgttttacttgtccatcagtcagaaactatcagagatactgccacatacataagacggtgataaagaatcgagaagtctgtagaatgtctctgatttctgtcctgcataaaccaacaaagtaactctctaccactgaatgacggctatttttcttttacatctttgcttgtataataggcagacaagctcactgcttttcacctagacactatgggttgctcatctttattggttccattttctaagcttgacaattatttgaagttctcagtaaagtgtgtcttttaaatgacattctatgattactgctggcccgtgtttttggcacagcagatgttctcttgtagtgagaaacttgacttggtttttgaagccaatgaatgattttactccttttctgctttctctacaagtgaccaggtaaatcagagtctggcttatttttgaaatgtttcttggatgaagccattgtacaaatgtaacaccaaaatgacttgtcatcatgaataggggcagccatcctttcttgaaagtagatccatagtgctatgcttgagttgcttagtgtaggtctgagcatgctttttaaatgctgtgtgacttattttttattattagaatgtcagttctctaagagttcattgtattaattcagcatgcaaaatgccagagtaaaattgtgtactgtctaagaatcctgtagctaaccttgtttctcagagttcagattgtcttacaaatctgagctacagcactggaggtcagcttgaagatgagatacactagtattgctgtttcagatggtgctttctggatagtgctgtttgcagcagatattgaagaatggtaaacacgtttgccatggttataggttgtcatggcatcctggttgtaggagcagattagtaagtactaaaagtgtctatgcagtagcccccatagaaggaaccttggcctggtgggaccagtaaaatctcttctgctctaaagggctctaagtctatgagcctttcctggtttagaacaagtttctttgtgtttgaaagcagagttccgtgcctggtaaaggcatgcagctgtgcccttagcaagttttgctcatgcccagtgtgaaaaggaataatgtaggcttccccagacgagcgttctcactgccagcctttgcacacgctgatgcttctgctcagactgccttcacctgctggtgctttcaactttcctctctcactctcttcccaaccatcacatttcagttctgtattcctgcttccctgagccccaggctgtatcacactgtgtatgctgtctgtctgtctgtctgtctgtccgtctgtctgtctgtctctgtcttgttctactgttctgcaggtgataagctccacatgggcagggaccaacttgctcttttcctagttagttcattttacgatatggaaagccatgcaaagtggatggaagacttctaactgtggcttttgaagccctggttctgcacaaagcacagacttatcatttagtgattttccagtgtcacatgaaacagtgtatctactagtagtcttcaagcacttgtcctgtattgtcattttttttaaaggtaaaggaaaactgacttgttatttcagtatttttgaaggtacttgtatcctagttgccaaacagaagttgtcatatcaaaatttacacacaaaatttcctgcttggcctattggttattactttttaaaaacttattttatgttttgtggctagaatattttgcttgagtatatgtttaagcatcatgtgtttaccttcagatccccaggaactagagttgtggatggttatgtgacacatgtggatgctgctgtgcactgtgcaggtcctctgcaagaacaaatgttcttaagtgctgaaccatctctctagctcccaccatcaataatttttactaaagcctcagccaatgcaggaaggattcttctactatctctagcctatcagcaaatgagtgggaggaacacaacaggtcctgtggtactctcttgcttttgggtttttgttcatgttgtttcccgtggtgatgatgtaagatgatggagactgctgctaaccactttcatctcttgcttccttgctcatccctgccttgtgctggccagagctgtacttttctacaagcagattctgataaaaatgttctaactaataaatagaagccaactttgagtccatccactgacagctgctgttggaaagaccctttgtagggatgagctcctttggtgtctgcactggcactcctggcatcgggagagaggcgtagatggctgctcagaggacagggcactctacacctggaagcaaaagtgctgccttcctttcttgactctgccttcccagtgtctctcttagtcattgcctgcccctttcttctaaatgcactttcctacacgtatgggctctgctgtttccttagtgaaaataccttcttatttttaaatctaataacctctgatttgatttatttttgtctctagatcagctctgaatgggctttggaaggtaaagaagaaaatccagtctgctttcagggacactggacaaccgaataaatgcaggtatgcacatttccttcttttattcttttaggcagggccttacttggaagtccatactctatgaacttaagatcctcccatctcagcctacctagtatagagattatggctatactattgcacctggccttaaaccgtgacacccagcctgtagaactgtctgtgttctgacctgactgtctgtctaatctgtatattattcattcccagtgttggatatgctagtttaaacatttcttcactgcaaaaatccaggaagtaaagtgaagttctcttgtaacctctccaggacagctatactgttaccagggtctcatctgttcttctaggtttcaatgcacgttgttactctcaggccccagtacacctgttgtgctctttcactgaagtcatccagtgctggtcatgtacctttatgactacagttccagcagctggagagataccttgtatagtagaccctctcctgtcagaagttatcactgggcattttcttgctgttgctcatagcactatctacaaagaatctctaagacagagatttcttttgccttacactgtgaagcaggcttaaaacactgttgattttcatcttggtttttcagtgtgatcaagtgctgggctttttcacctactgtagggtaagtcattagcttagtcttcagaccgatttcaagaagattctggtttttagattacttgggatattataaattaaaattgaatacctggatggtgtcccttttaaattatctcgcttcctaaccccacgacagctgatagactaagcaaatggatttggtgctgagagttacgacaggatatgctgtgtaggactcctcatgtctggggagttccttgtatcctctcccaagtgcccactgtaggcaagcctctctgtttcatactgggtataaaagataaatacagctgttatgctcagagattctcacacacacgcgcacacgcacacacacacacacacacacacacacacccacacacaggtgtggctagtgtgattactttgggagcacaggagagatagcatcagcttaagggtacaactggggcccagtgaagcaatcttgatggaagtgctagtgtgggcagctttctgaagattgaactttgccatgaagggtaagaggcaagtgtatttcactagtggaatcattatatgcagagatggcacagggggaagaatgggtggtgtgaagagacaggatacctggtggcttgggtttcaagcatctagaagtgagaggagatggggtgaggggccagccaatcaggagtgtgtagataatgagtaactagcagaaggtctgatctgtgttactgagataacacttgggcactcaagtgaagctgaggctggcaggcaggaaggaaatactttggggacaggaaaatggctgggaggtcattggtgttgcaagggctgcaaggatatgtggggttccccttgctctcttcctccgttgcccttggctggactcaatgtccaggactgctactttagtcctggcccacttgttttgagggccttgtgaggttttcctgcaaagagcttacctgtgggtctttccttgcatgagatgcttgtcttcctgcttccctccagtgacagggacctgtccctagtcatcaactttcatggcccttccatgtgatttatagtgcctgagtggtagtcgctttgtgtacagtgcctcagatgacgacaagaacgaacgccgagaccggaaagactaattctttctgttggttgcttataagttacatgaccccaggagaggcagcaatattcagtcctttaacatcagtgactccagaggagagcttccaactacaactagtatgcaaatacagaagataattcaaatcctgcttaagattattctgactgttgagaatatggtctggctacttagttactgtgcataactaattatttctatggtttcatctcttataagtctggtctcagtattcagaaaggaaaagcctaggagttctcatccagtctcacagatgcctgcttgctttcctccatagcaaacagcacatggaatgactacattgtctgctcttccttcccgacagtatctaaatataaaagaggactgcaatgccatggcgttctgtgctaaaatgaggagcttcaagaagactgaggtgaagcaggtggtccctgagcctggagtggaggtgactttctatctgttggacagggagcccctccgcctgggcagcggagagtatacagccgaggagctgtgcatcagggccgcccaggagtgcagtgagtactggcagcagggctgggaggctgcactgggacactgggagaagcacatgtggagcctctcctctttttatttctgctgagagcaaggtgtgagttctggaagccagggtcctgccttgtttcctaatcctggaccttcacttctcactgaaacgtgtatttctcccttatcattaacaagacagctgtggaataccaaggaatgacccttgccttctgtaaggctcagtcttgtgggacaggctcatgttatagttcaggatgttctagaactcagtaaatagcccaggctggcctcaaagctgtattcctcctgataccgactgggtactgggattacaagtatttaccatcacactcagccaaagctctgttctctgttctctcacagctctataattgagatgccatcagcactagctgaggttctgtgcaaatgtgtatcaattcagtagttctgtttcctaacctatcgctgaacattcagattccttgagtttggcccggtctcctcttacttggtcccttctgccactttgaagtgagaattttagggttgccccatggcttggtcttgctacattgtgaaaaggacacaattcttttaaaagtgagattggtttataaaaatgcattatgtttgaaaaatgccatgatgacacctttgtatactaacctaaaaattaatttttaaaaaaagtgaggcttgctttacttaaagttagcccattgctaatgtgagagatcaaagtacctaacaaaataaatctcctttcgtcatcctccagcatggaggtgcatggtgttcacccacctcattttatatggaaagtaaagtaaagccaaagcgccataaaacggccacctatctcacacatgagtttactcaagtccattggaatatacatgtaggacaggtgggttatagtggcaaactgtattccaataaagccgtttggaaaggattgttgtagatctacttatcgtgatgaggttaacttgctgtgatgctgcagagcctgggccatgctctgcctaggcctttagctttgagagcaacattgtgggaatgttgtagtcagtttaagatcctgctagtaacatagcttgtctggaggcctcatttacttcccgatacacatcattctgcctaacgtgctttacacaccagaacaccaacagaagggtctttatgttacaggggaagaatatggtaggctcttactaccctagtactgctacatggcattaaatggacagagctctgtgtaatgtgggaaaaggaggccgtatttttaagtaactctcactagacggtagtttgttaggatctgacagtagagatatatgttcctcagaccagtgtgtagagaatagatggtaagtcttctgttaatttgaaaatacataaacactgaatgtcacagacttttatagctctcattggtgattgcagtaagtggtatggggcagtgcgctttcctttacactctcacctaactctcggaaagtttttcttgtagctttcgttgtttggctcctgataggcccagaagcaaggcatctatttcctaatctgtcttccccaccaggctggttattattaaaggagcacagagtgtagtgggaaggcggaacactgttgggccagctttgttaagaattcttcctgctagttaatatgaataaatacattataatgtagagagtacttaagtgtgtttaaatattaaccataatacattttaatcactgacaaagtcactgtgtttatttattctaatatgtagtttgtatggtggccagaaacaactttgcatatataatgtatagtcacactgtcagaattgtttaaaattgtagggaacaggttgaggaattcctaccttcctcagatgtctgttcccttgctgtgatttaaaaggggcacatcagatggaatctgtgggcctctgagatagcccttttttcttttaatccaagtttggtaagactgctgtaatgagaactgtatcattttatttttaaatgtctttaatttggtttgccaggagccaccgtacatgctcctagggagctgtgattcttgattaacatgattaaaatcccctgagtgaacatagctgagagttgcatctgcgctgagaggatgcaggtgacagagattgtttctggatgagagaattccttatcgttgtgtgttgctctttgggaacagatggccaagtgcatctgcctgtaacttagccatgtcctttcttctcaggtatctctcctctctgtcacaacctcttcgccctgtacgatgagagcaccaagctctggtacgctccgaaccgaatcatcactgtggatgacaaaacgtctctccggctccactaccgcatgaggtatagcacagagagctggtgccagagggttcctcgctcgtgttacctggggcagtgtttggccggggccccagtcacttaggaagaagtagtagagttactttatttgtttgcttctcattcaagaagggacaccttccgtgttgcagtgcgattcagagtgaatttgatcacctctcacgttttatagacatgatatgaagattgttttagatagagttcaagccttctagcagttttccacgcggtgagtcatggttgtaggtttaacataatgggttataaccagcacttgaaaaacaatagaaagaaagaaacaagaactaaacacacacacaccctcctagtattctaaggtcattgtattttaaaacttctgaggtgtgaaatatatatgcatatactaagttgtgatataaaaatgtttcctactaaaggctgtggctaagaagcatctgtatgtcacctgaagaggtaacagaaataagtgctcagccctcctctcagggagtggtgctttgatccactcctgacaacattggactctcgttgctcttatccttcgtgttctgatgagcagttcacttttctcccacaccagagattttgttaaatgtcccaaggtcacgtagacggctggtgcttccattcatatacacacttttgactttgtaagtgtattgaggaaatgttgtgggaatgaaaccattttagatggcagtgaagcacaagctaatatatgcttagccatgaagcttgtaagtaggctaggccctttctgaaaagaaccttgagctgtgtaaatatggttaaggcagtagatcacctcagacactaagaaggtgccaggtcaccctagaaacaccttccagaatctccagggtctccagagtactccatctgtcgccttcgttaagtgttggctgtgtagcaccatgccagtctgagaggctgaattctcttctggcactcatctaagctctcaccttgtggggaagctgtgtgccctgtgagattctgacctggctatagagggcccttcagccctcccagctgagccttctcactatattagtttctttttctcacgctgatcttacttcccacagcctggggctagttctgtgatcaaaactgtgaggtggaggtgcagctagaaacttagacagggacatgcccttgaggtctaattctttcccagtaggctttttttttttttaatacttagatcacagtccagtatggctgcatttagcatttacaaaagacgtaagcttgcctgactcaatgctcccattattccagaggaaactgatggactccaatgagaaggatttggtgtgcagttccacacctagtaaacagtcttggtagtgcggcaggggcttgtcttcatggctacatgtggcgttcagctgctcaccattctgttagctgctaggaagtgcgcagacttcagttctgtcacctggactttacccctgccagtgtgctttaacaggatattgctttgttaccacagcctctttgaagctggggaaagataccaccctcagtgcagacatttgtggtggaacagtctacaaagagcttgagagctggtactctaaccacggaagaagtgcagtaagaaaacaagtctagtgactgtcacagggccatcccagctctattttagtcatgcctttctcttttcacttaatgatgtggatggttgtttatgatgtacgttaatataagacagccatattctttacttgtattcaaggaaaaataaaaccacaagtgacaatcaccgacttcagtaaaattctgtagaaacttaaacttctcatcaggtccagagtttaaatgtaaaccaagaatgtgtactcatctctagtgtctctctggaactgtcaggttctatatggctggtgtgttgctctctccttccttccttccccatcatcctgaaagggtgtgtgtgctctgtggatgccacactcactcactcccactccgttttaactattatcgtattatcaggacttacgtatacaaagttcagtaagcagcatggtgttatgttggagctggcctagtcagtgaagtgcttgcgagggcctgggtttgggtcccacccagcaccaatatacaaagccagacatggtggcctagttttgctttattagcaattacggttttaatattggtaatcatcttttatttttaagtctggaacagttcacagatgtgtgtgtcgcccttgcactggatccatgcttatctctgtatcgttccaattttactatttgtgctgacaaagcaagcaccccacccccaagcgtatcctaggcaacttggctagccttgaactttcagtcttcctgcagaagccttccaaattactggaattgtaagcaccaccactgaacctggctttccatgtaaagatcctagatggatgtggaaggagtgtgtatgggctggattggttcagagagcagctgtcttcagtgcttctctcagcaagcttgcagggaactgccatgctgatcatgatgctgtggccctcacatgctttttatctaccagaatgtacctggcctatgtgctctgcagtcagggccctggttgaacctttgtagctggccaggtgggtcattcccttcctgcttatgggaagagtggagcttcactgactcctttctgctgtgccccgttcttgtgaagagtatactatagggcccaggcccacataagcatgtcactgcactggtgggccctaccaattgaaatctggtctcctagaacatacatggaacttaaggggatagtttaccatctgctttggagacctggtgtagtttgtgcagcttgtggttgtttctgcattcaagacactgatagtcagtctcccagttcctttcatgagctacagagaagacaggctgtacacaatcatggaaagctacaacactgttttttaccattaaagtaatagttccatcctgccctgcccatgttgaccctactccttgagtttgttgtttatctgtaaactggcatcacagacaaacaacaagcacctgctctgtggctctggggatttggtgctgagctagacagctgtggcctgctgtcagggagctcttactttgcccacactgtttcaaaatgtacctgtttgtttcctagctaattcagccagtcatcttgttcttgcagaagcatcttgcctcatccacttacctgtttgccatctgtgttctagagccaagcatgtccaacctgtagcctgcaggttgtgtgcatcccaggataattatgagggtagttcaacaaacttgtagatgataatgttatattgcaatatcaaaaggttggaattctggtatggcattcattatcctggacaagttacctattaaacatggtgttaagggctcaccgtattatcaggcgtccatgaaatgctcatgttttatttctaatcacattaaactgagcttaagtcaagctgtgaaatgtaactcttgacagatatttatagaggaaaagagatgtggggcttgtgaacagtgcagtgtagttctgcttgtgacatgtgtcccacttcctgttgttttgtattattgtggggcagggaactcagagggcagaggctatgcccgagagccctctgtgtccttttctggctctgttgttgtcgtcagactttcatagcagctctttagggtgggagttgttcattgcttctcagtgaaatggctgcttttctgtcaacttactggcatatttgggagagagccccagacagagccgagtctgtagcctgaaagacagctggaccactttggttcagccactctcagacagcttagaacccattctgtctccccaacaggtagcaggccaaaggattagtgagtgaggcttggagggttaggtcacctcacctcagtgagcttgagtttttctcatctgcatagaggaaacgatgaagtctgcctgcaggttttgctgttaggagtaggtggatagaggggaaagtgctgctctcttttagcgggtctccacacctgatgattttgtgtttcatttttgaagctttgctcatcgtaaaatacatcaccaattcagtaacagccatctgagacccgagaaacactactatattagtgttgattgtaggacagagcttgatttcagaagtggtaggaccacaatggagagagctcaggccgggcagcccagcagaactagagatgtgaaggagcagctagctgtaggtggcaggtggtgttttcacctaggaaggtatggaagacattatgtaggtcagcagaattgtactgtgaccaccaggacatcattttatcctcctgtcccaagagaggtgctgaggtacattgtgacagcacacttggaagagagagaagggatgttgcctcagggtgatgagagttgagggtgcaaggctggtgtcttcagtttcctcagggcagttcagcttcagcaagggctactctagatagatacctctcccagatgagcagtccagggactcctccaccacatttgacatttttatactgtcttttaggttctactttaccaactggcacggaaccaatgacaacgaacagtctgtatggcgacattctccaaagaagcagaaaaacggctatgagaagaaaagggttccagaagcaaccccactccttgatgccagttcactggagtatctgtttgcacaggtagggagcttgagctaggagatctaaagtttgtgaggagtgtgaggcctggtggggctcagagtccctgtgcagttgtgcttagtggcactttatggcctgttctcagatgcccaggtgactgggaaggccgtaggctcctagctatgggccttccacaccagttactttctttccactgctttctaccactttgcttatcagctgtattctacatgagagggcacagagtagcttttgaagggaagtgaggtagcagccaggccaagagaggctggaggtgcctggaattgcattgcttcgggatagctagcatgtttgatgcaatgtttcctgatttcaatgtcaattttctattaccccatgtatactgcatttggaaataccataatgcccatgttatttataaaccgcatctttattcatcttattttcatcttccttctcattttttagatatccattataaatagtgatctggctggacatggtgatgtgtacctttatagtcagaggcagaactatagcaaagttgaggccagcctggtctgtatacacatacacacacacacatacacacacacacacacacacacacacacacagggccatggttattgtgagatcttgtcccagatcgactcatctttaatggcttcatatcaattcattgatgtaacatcaagttacacaggtgtccgtgtcttgtttgctttctgcggttgtatttgtcaagaccctgggtacttggacgaaacaatatggtttctgtgtgcccccattatatcctcaagtgagacaaaaagaaacagtgagtttgtaaatatcacatagatagtgcacagaaaatcatgagggtcaggcattccatctcagacttgtgaagtgccgtaatctcagcactttaaagactcaggtggtgagtttgaagtcagcctgggttacacagtgagactgacttaaacaaaaaagagcagaaagggacagactttagtgatagagcctgtggagcggcttgaactgggagaactcaggaagaaaggaggagattgccctgcttcaaggatggctccatccttgctttagagtctcaccttcaggagactcagtgtcagttacttgaggttagagcgctcacagtcaggttctccctcctcttccaagatctcagcatccatcagagttcttgctcctccagtactgttggtataaattcttgttctttctcaaaactttgtggaaatggccagtgaccttgctttaacctgaaagaaaaaacctcctactatggacagaaagaacttcagcctatctcacccctaagaaaacaaagcaaaacagtaatgtgaaactgagaagtgctttcaggggaagtgagtcagtagaagccactctgccagatgcgctcttgcctggatagaaagcagctgggaagctcagcctcctcggcgtgggaatgcctagcagagagtggtgggctgtgggagtgttgaggaaaggcgccctgagtcaggatcgggctcgccttttttttttttttttttttttttttttttgcaagcatctaacattagtgcttcctgtttctcttcttcagagcggaccggatgttgtgctcagttagattcctcccctagtgggactctgacagggctgttgtgaggactaaggtgaagtaaaggaacaactcccatgtctggcagggagggagcttagcggctagggagtgtgagcctgcactgcccatcattgctctgagcaaggctagctgtgggtactggttctagtccagttttacatactttattttattttttgtttgtttgtaaagtccccattggtttgtggaatgctatgttcctcgctccatctgtgagatagtgtgctctcatggcgttcttctgtactagaaatgtgaataacacatacggaacaaactaatggtttgtggtaatgatgctctgtggaatgtaactccttcccctgtctccaaacccataatagtacatatttatgaaattaatgctgtcagcccgtgtcacctgccttgcagttgagacctaatagtcacagtgtttaggcattgttaatttagaggccccatgaaggggggggggggggcgctgtgaatctgtgttcttcaccagcaccttgacaggtactcagtaaatactcactaaatgaatggatgaatgaatgaatgaatgaagtcatctaggagaacatattcttagctgccttgtgctccacttgagtgggaacagccttgatcctggagacacactgatgcttctctttgctgggtggcattttggccagctcttctctctaggtcagcatggtggctcctgaagcttaggtggtgactcagtttttctcttctctgctcccaagggacagtatgatttgatcaaatgcctggctcccattcgggaccccaagacggagcaagacggacatgatattgaaaatgagtgcctgggcatggcggtcctggccatctcccactatgccatgatgaagaagatgcagttgccggaacttcccaaagacatcaggtacgccttcctgatgatccgagtcggttgtaggcacctggtactgatttgggacattgtttttgaagcacagtcttgctgtgtgtagctcaggctagcctcaaactcatgttcttccttcctcaagtacctccaagtactgagattacaggcatgttccacctcacctaactgtaatgctattttatatgctttcatatatcttgtttggctgctgcactgtttttctgacatctctttgcatgaatcaaatctttgaatatttgtgctaagtagcacattgaacattatggcttgatatgctttatgctaactgataatctcagaaatgtgaactagagtgaaatatccaggcagatgagtgatctgcatgtcctccatgcttcctgtctttcccatggtgatactgctgcctgttggaactgccttctttaatctgcactctggtctgggagctgttacttctgataggcgggacggtcagttatttgtttcagaaaattttatataagtgtgggttgagattaatattttgtctgctcagtctatctctgaaattgaatcatctttccactcaccaatgagctgtgagatagcacaagctgcgccggtggcacatgacttggtcccagcccttgggaggcagaggcagaggcagaggcagagacagaggctggacgatctcttgagtttgaggccacctggtccacacaggaagttctaagacagccaggattacataatgagactgtgtctcaaataaaaaaaaataataaaaaagggctgaaaagaaaagacaatcccattttaaagagcttatttacaaaggatacagcacaatgccagagctgtgtctcacatgcttgagctcctcgttccttccgcagtaccacagaacggggttcacccccaggtccaccgctccagtatgaaaggagagtttatgagagtggtatgcacatgtcatgaggtgatctccttttctctttgtgttgtcagtatccagtcgctcctcaggcaggggattagacattttccaggtcacttttatgtgaccttcactccttgtgttttattttttcaggtggcttaagttgacaactatcctgtaattctattatattacttttaagagaaaaactgtactatttgctaaagattggtctgagaattcacagtatgcctcagtattgttatagggattctttgggccagtttacctttgcttgtcccagtggacaaaatatagaaagaactaaagtaagcccttgctctttcaggggtattagtcctggtctttttcagactatctcctgcctgttagcacggcgtgtgttgagatctgattgctagagagcctgggacaagtaacgaagcttggggaacttgcacagtcacatgggagatactgtttgtatctgacatttgtgagtttttaatcatcttcataagaaattatataatttttagcgaacaggatgcagacaggcaggcagcgtagaatgtgttaatctccagaggagattaaggcacagcttgatgcttttcagaacattctaactcaccctgaagcaattctctctatgactgaggatagccttgaactcctggtcctcttacctctaccccagctccccagtgctaggattacagatgtgaacatgatcccagtgctcagtttacccgtgcatatgagtgttctaatgtgcacagagccctaaactagcaagcagaaatctagatgactcagcttttttgtctccgttgtgccaggggctccagttctcctgacatttgtggaactcgtgatgccatgcacgctctctgtcaggattgtgtcttatctcttcacagccatttatatccgtggtcctcagggaatagtcactgttttctcgtttgcctaaacatacaaggaaagtcatagaggcagacttctaatcatttcttgctaacctgtatatataaaaattattttcttttagctacaagcgatatattccagaaacattgaataaatccatcagacagaggaaccttcttaccaggatgcgaataaataatgttttcaaggatttcttgaaggaatttaacaacaagaccatctgtgacagcagtgtgtctacacatgacctgaaggtgaaatacctggctaccttggaaactttgacaaaacattatggagctgaaatatttgagacttctatgctactgatttcatcagaaaatgaattgagtcgatgccattcgaatgacagtggcaatgttctctatgaggtcatggtgactggaaatctcgggatccagtggcggcagaaaccaaatgtaagtgggtgtgggtgtctgatctaaaaaagagaatatccagggtcatcaagggaatgtgctgttgagcctgtcagaatcttaacctcacctcgtaggctacattaaatcaactcagctggaggccactcatctctcatcactcacaacacaactgtggcacagttgaggcaggaaatgaatctaggcaggctttgacgtcatgaaatagataactcctttgtgttatgaagcttgattgagtgttttattgtactggggatcgaatcaagggccatgagggccatgagcatgctgcagacccctcccgcacttttacttgtaattacagtgctgggaatcaaatctagggcctgatgattaggcaagtgatctgctgctgagtgacatctgcagccctttgtctttgtcaaatgaggtaataacatgagttgaaatctaaggaggcatgtttaaatttcagctacactccttgtatttaaatggccttaggagggttattctacccaagtaggtgcatgggactcatctgtcaaatggagatactgttgtctcttagtacctggatgcaggtattggtcaggattctgtgtagggaccaaaatctgcctatgctcaggtctcataggtaatgatacagtatttttatgcaacctgtacatccttctgtatacacttgttttttccaggttgccttataatacctaacattatgtaaatgctacataaatacttacactgcactatttggggaataatgacaataaaagagtctgtggaacatacaaaatattacaggcctgacattttgctcattggctgttgaatctgtgcacacacacttggaggacgtggaacccaagaaatcaattggctgactgcagttactatatctgattcatatggttgttcagagagctagatggtgtgttgacaccaaacctggctaataataacaactgttgtctgaattactgtagctgcatagttattactacaagtaatattaaatataagattaattttctcctcctgctttattctcatgctaaaataacaataccaagttaccaagtactttctgcatagtaattaacatatagataggcatgtgtctaatctcatgaagagtgacattaaaagttgatattttatggctgggaaatggtggctcagagatgtcagggagttaatgtggaagctgtcatgcagagctcatgctagtcagctagataactttgtgcacgtatgtactctttagggtgtcagttgttgagatgagttcctatcatctcttgaagcctcacttaggcactagtctaaagtgaaaacatgggtagcaggaggagcttgggttttgaccatttgatgtatttgggaagatctgctgtctggctgggcacagtcagtctggagttgaggaggcctgcggctggtacacatccattaagccctctccggcatcagcatgcacactataaatcatgcaccgtgctcatcaaggactcttggagaaccaaatcccaggattctctggtgtttgtaagcccatgattccctgcatttctctgacttcaggcatgctggctttctcttctttgggcctttgccctatatgaaattgctagaagcactgaccttttgccaacagaaaatgagaaagctaactaaatcctgtcacttttgttatcttatcaggttgttcctgttgaaaaggaaaaaaataaactgaagcggaaaaaactggaatataataaacacaagaaggatgatgagagaaacaaactccgggaagagtggaacaatttttcctatttccctgaaatcacccacattgtaataaaggagtctgtggtcagcattaacaaacaggacaacaaaaacatggtaagctcgctcgagacctgcccagactggatgtgctggtgagagactatgtggcacatgatttccagagtttgctgtccccagttaaagctcctttgatggtccctttgaagccagaagtctcattgccagcccctttcagtgtctgctccagagttccactggcacatcccaggtgcttggctcttacagatgtccatccgctttagggtttgttgaccacataaagacatttcagtgtcagtatttagtttataaaataagtgagtggtgggccagagagatgacccagcagttaagagtaattgctattcttccagaagaccccagtttgcaagccagcatacatgtcctgtgactcaaaaccatttgtaactccagctctaggaaatatgatgccttcttctggccactgtgggcacttgcacatgtatggcaggcacatatacattaaaaagtggataagaaggagaaagaattagatcagttctttctttattgtaccatgttgatgtggtagttggaggcctgtcctggataagagcctctgtttgtggccctcccctggccctggtaccttatttcttcccttcagttgcttctgctgatctaattcctcccagactccacctccctagatggtctctacctctctggattctcttaagagcatagatccactatacaaccagacccacattcccaatcccagaaattaccagctgcccatttgtcaaggagcaaatagtgggggaagagaagggactctacaaggacaaggtcccagaaagccctgtgcatgcatgcactaggaccctagagcaaagctggatccagcacctggcctctttgcactgtctgtctgtctgtctgtctatctatctatctatctatctatctaattttttttctgttccttctgtctttctgatgtttgggccactcttgtgtgtcatagatcttttcctgaagtttattactataggctctgtccattcccaggcagtttcatactgttaaccataacttaacctctgatcttaaaaggaaaagatggagcccacagaggtgtgcctgctgagctgggtagaaggaagtcgcactgggctcatgagtaggccacagagcagccccagtggtgtcaggctcacccaggggctcgaggacagcagagagggtgttatctcgctttgtcttttctggtatcacttgaggacacagcttagacaagcaggccagcttggcagggaaagtggtaactcttccaagtaaacatgtttttgtcgtgggaagtcacccctgataacacgtgttgaggccaggctagtgtgacagccatgcctacaaagtgaaggccatcagcaccagggaaatcttgttttgcttaaaacaatgacagaaagataatgcacagcgcaaggggagagcccagtgaggcagcacagagggccactctcccctgtgcagaggctgcctttctgacaacctcctagaaatcagtttgacagcctatggcaaaaatcttgaaaatatttctgtgggttccatttaggaacccagtgaacatgttttccggaaactatgaggtacagacagtggcttatgaataagagtattcatgtcaggtctctgagttcaaagccagcctggactatagagtaagttccaggatagccagggctacatgaagaaatcctgtcttgaaaaaccaaaaaacaaaccaacaaaaggggtttatttcaacagcatttgcagtcaaagtactacaaacaacctgggtataaaatagaaggctactcttaacaactttccaggtgtcagctgtttaattaccatgttaactcggtggtggcagaggtcatccctattttacagaggcacagaggttaagtgacctgttaaagacacaaattgttggttaaacaatttgaaattgccagtagttgcccattttgacctataaaacatcgagttgaatatgtttgagcctggtagcaggtggggatgctgtgaacttgaagaggctggttacagagcctgcggttcacactgtgcctctctatagatccgccctttgagcaggtagtacttggctactggtctttcatgaaagcaggatgccagcgtgttaccaagtcttgctttgatctctccatctctcacacacttctcaggcttctgctatcaagaaaccaaggtgcttgtatgccaggtggggtctgattcagcccgccacccccctgctctagagcatttgaaatttgcttttcaaaggtatctgaaggtcgatgccagccagtggagtgaagtaattgtggtgtgttttctctcaccaggaactcaagctctcttctcgagaggaagccttgtcctttgtgtccctggtggatggctacttccggctcactgcagatgcccaccattacctctgtactgatgtggctcccccactgattgtccacaatatacagaacggctgccacggtccaatctggttggttccagaattttctcaattacctttggtgtgaaaagagcccaggttttagaggtagaaagtccccttagctctgcatgtggccagttgttgagggtggggtgagtggccatacacttggaggctgtcttctttgtgaagtatgctacttgagcccccaccagcccttcctgtcatttcctgccatggctcttagagcatgcctcaactactcccttaatttgatctctgcttctcatagattaaccccttcacttctccaaagccaactcctactctgtccaatactgagcacttgaagggagacaggaatgcagatctttaaatcttaagaatggtcctcatctgtattccacgtgacaggtttagcccccttctacccatcatgctctgtgccctttgggcatcaagactcactgcatttgggaatacagaggaacataaagtgtgttctctaatactcttttactcaccactgaggtatttattctgcttgtcatcaattaagctcgcagtgaaggaagtgaacccaactgccccaacgggccaagtgtgggactccactcaatccttagctactcttacttcctagtattaaggtacactttatggtaagatgtggagacatgtctttgtagattttgtgacagtaaagcagacctctgtgtgttgggtgcagtaggtgagtttttttcctagaaattggaagctctggatgtctcaaactccttctcaccacgtgcttcataccacgccagagaggaccttaggagccaggcaggtgacagggtgtggctgggtgtccctggcagcttgtgttctatggtttgagcctctgtccttgcctacttctctctccagcacagaatatgccatcaataagctgcggcaggaagggagtgaagaggggatgtacgtgctgaggtggagctgcaccgactttgacaacattcttatgactgtcacctgctttgaaaagtctgaggtcagtggggacatagatgtgggccaggggatgcagctacaaggtatctgttcactaccacccagcccaggaactgtgggagaaaggaacaccagggtctctctctgagcaagtctctggtagtctggaaagaatatcctacctgataggacactcaatagcacgactctgtattcttcctatgtctggtcctccctccctccctccttccttccctccctgtcgcccttcctccttttcttcctcctcttctttcctctcccctccttccttccctcttctccttttcttcctccttcccttctcttctcttttctctccggagaaggactgtaaccttagaaggtagaatgtgaccagaaaaccgccattccatcaggcacatgtgaactttagcttaattatctagagtgacttactctatagccagtggcagaatcatcaaacctagaactgtgtttgcctgtggcattctctggtgtaggctaatgtcaaagagccacctcgtcaacatggcctgtttcccccagcaacagctttgggcattttaacataaattgctttcccaaagtgtctgctgcataaacagccagatgcagctccaaacgattgctgattcatggtccctgcagtgccttttctattcacgcaacattttagaatgcttaaaaggttttagagaattttagaagatgtcgagggtgaggttttgtttgttgtggggttgggcttttcttggtgtgtttgtttgtttgtttgtttgttttgagacaggatttctctgtgtagctctggctgtcctggatctcataatgtagactaagttggccttgtgctcacagagatcagtggcctctgcctcttgagtgctaaggttgaaggaatgttccaccaggtccagtgagggtggtgagttttatgttagtctacattaaatctaccagcaatagtgagactcacccagactggaaaactgagttgaaagaacctgttgatggaggcaaagcatcagacacaggagacaagtgttaagagagccccgaggactgggctctgtcaaagtggaaggaggaagtcacataaggaacccagtgctgccagatgtactgggtaaagttccaggagtgttcctgaacagccagacctcagggctgccttgggcttggtggcttcctgttttcacttactggtcagtctttggaggaagtttattagtatgcatggctgtaaggtagccccgccttctgaggtagactcagagcaacatcctagtcagtcaggttgcctggggaaaggacagtcacaaagaggattgttgattgtacatgcagctaaagagaacttacagaggccatatgatagaggtggtgctgttccattgtctgggtttgtaggatgcattaaccttgtggacacggatgtcttaaatgtcatgtcccagtttttactataaagacatctttctggctctcactctttatattttttttctttgtataagaagagccatggaagaaagcttctcggacaggtttttgtggtgctggaattatggcctggatggacagccagctcccagctcccagctcccagctcccagtgtgtgtgcttctccttgggctggttcatagtgtgtgagggctcactctgaaagagttccgagtgaatttaaccttcacagttcttatttcatacatacactggttaatctttataaagtactaatggtttttttcttataaaaatatcatatattaattatacataataatgggtttattatattttcattcatgtgtgggtatatgtatgtatgtgtgtgtgtatatatatatatatatatatatatatatgtaatatgatccttattcaacccccatgatccttgcccactctaactcctgccagtctcttctcagaaagtccttcttccgttgtcatgtctttttttttttttttttttttttgatgaccaaatgattttaattaggattgctcataggaacacaagatccatcctagcagctataccactaaagacaatgtctcttcctcccccagcagctattaactgtattaacctcatcaggagggatggaagnnnnnnnnnnnnnnnnnnnnnnnnnnnnnnnnnnnnnnnnnnnnnnnnnnnnnnnnnnnnnnnnnnnnnnnnnnnnnnnnnnnnnnnnnnnnnnnnnnnnnnnnnnnnnnnnnnnnnnnnnnnnnnnnnnnnnnnnnnnnnnnnnnnnnnnnnnnnnnnnnnnnnnnnnnnnnnnnnnnnnnnnnnnnnnnnnnnnnnnnnnnnnnnnnnnnnnnnnnnnnnnnnnnnnnnnnnnnnnnnnnnnnnnnnnnnnnnnncattttttcacgaccttcatctcacaggtcaaaacgcagtatgacctttctgtagctgtaagctctccatatgtgacgtgctggcccctttttactttccgggtactatttcattattgacttactgcttggttggcttgttgatgaagtttattgggggatatttttagacatacagtttctacaccttcttgctcagtgacccctaatattacattgcctgatcccattgtaaacatggttgtttttgtggatggcaggtattgggtggccagaagcagttcaagaactttcagattgaggtacagaagggccgctacagcctgcatggctctatggaccactttcccagcctgcgagacctcatgaaccacctcaagaagcagatcctgcgcacggacaacataagctttgtgctgaaacgatgctgtcagcctaagcctcgaggtttgtctctgttagagccaagctgtgttcctctgggttgtcctttgccagttgtgatgctttacccatgtgggccaaaggatgctatctgagttcaagaaactgtagtcctaggtgtttttctctaagctctgtctcaggtctgtccccatgtcacatctcatctctagtgccagtgttgtctgtataacatacacctctcctcagtgccccagtgagactgcagaagagtctgctcaggattaataagcacagatttctttgttctttgagtaaagtggcttgacaactcagtttggtttatgtatgtttctggcacatctgagggctaaggaactgtgttataacagtgggaagtcccaggccctggtcactgagggtgtgtagatcactgagaccacctcagtagttgatgggtgatagataacataccctagggtgaaaagagagagaaacagtccaaatctctgagtcctgagcagatgttgagcgtagtgttgggttatgagagggaggtgccagtttggcaaaggcctgcccagtagagctgatgcaggaccagtgtggtaggccagggcaggagctgtagggagcttcaagaggaccactgtgaagtagagaaggacaggagaaatggaactgaggagaacagattggctgccataccaagggactgcagccttctcctgcagtcagagggctatagaaggagcaggaactaaaacccaggcaagggcccagggactcacctggttttggttaagctctgaaagaagcatggctaatgtccatgaggtagactccttgcctcagaatgtgagtgtgaaaggatgctttgggggttacctggccagaggcctcctctcacagaatgaaattagtctcatggaaagtacggtaacttggggtcaggtctcaccccagatactggatcctcatatattggagtttttgtttctgcaccccaacatgctgtcttgcctttgctggatctgtccttggaagtcttaagaccttgaagagaaggcagcacacaagctcttgacactagccttggagcaggccctttgagactatattgttctttaagggattacctttgagtaaggaacaggtagaaagggcttgggttttctagaagtactagtgattaaatccagggcctcatgcacataagtcaagtgtttacccaagtgtttctgctgagctacacttctagcccagggctttgagtttacaatgtgtgaattatattttagtctcagcaaaaggcaagttcctgaatttggtgaaagaggaaggttgtgttcttgttgatcagatagggttacctgccagcctcagagtaactgcagcctttgttttcatgctagccagtgtgccacaaagggcgaaaacacacctgcctcttggccatgaaacctcagagctccttagggctttaaagcccaatggtcttattttttacatgacctcccttctggtgttaaaagaagatctaacttccctagggatcatggtccccgggagaagacagcatccacggaattgagaaggccaggggctaggatgtgctttacttgaaggttgctgatacagacctctgatgtagctaccacctctaacagcagagactggaagccagtagctttggagggaagagtgggggaacagcgttgaatacttgggtggcttttcccgaggctcttctgaaacggagcactgagagtgccttctgtctacttttctcacttgctttagaactctgaaggtctgagttttcactcactgctctgtgattcatgggaagcctagaatgcacaccagatcttgtgcaggactgtcccattgggtgataatatttgagcagcttccactgtagcagtacctactactttcaaagtagtgtagtgactatcttattgtttattgttttttttttttccacataggaagttggtttcagggatattcagtgaattgctcaaggcttcacagctgatggcatcagcagtagtatagtagtgacagtgaataataacaatggctactgacatcttagtgagtgtttggtctgcctgtttgaaggccttccatgttgtagaccatttaattatcagaagaattcaggatgcttggccaagactccaagtgaacaaagattggagatttgaacaccctgtctgacctgaatacactgatatgtcctccccattccatcttcatatgctttgcataggaataggtactgtggtcagctatctctgggacacagggtatctcatctgaggggagggagagaaagctgaggagcccagtgtggatcgtcctcgtattagttctcagaacctgcaaattagagaagagctaaaatcaggaatgtgtaacacaaagagtgtcgttacaggttgctcaatttctctgcacttgtaactagggttcccagagccagatactctgatctaggttttacactgcagtatacatcgctttgtggaatagagaaaaggcagggaaaagccaggaagccagacagaagcatatgatagataagtaagcccttggtcaggcccagcactcaggcccacacaccactgaacatgtgtcagtacctattccctggggcctcctcaggatgggcaggtgtgatgctgatttccacttagttgctccttgtagaagatgtctgcattctgatgcacaaggctggaacgctctggtggaagactaaggtggtggttgatcatgacgacagtggctgccagtagtgaagcctttactgcatactaaagaaagctcttctgggcatggtctcatctgtttcacttagcaacctgaggagggcacagctttcttgaacgaaacatccttatgatggtgaaatggctccctctctcacaggtcaagtgtagtgcaggtccccacacagataaccaagcctgagccactctagactcatcctactctctgattcccagatggtcggccaccagcctctgtctgccctcgtgccaccagtcaaatagcctcattgtatttgactcctttccctcctcaagatggctgtacagagcctttttatttaaattgtattttcccaggctagcatcaaaagagaaccgtgcaaggaatgggctcagaaaaaaggagcacccagatgactgaagccagtttctggtacttagatttgtaccccaggaaagtcagactagagctgtgcctggatgctctgtgaagccttcctctctggcttagcaagctctgtggttaggttgctgagtctctttgagcctttgttctgatctagagtacagataaggatgttgacaattcctgtctcttgagcttaggcagaggagttaacagtttcttatagaactgtacccagcatagagaaaacagaacatatgaatgtaaacaaaaaaaagaccatatgaatgaaaacagaacaaaagaagatttgaggggcccttattgtactcatgtaaccagtgttgtaacctattgcttagcagtttatttacactagtctgtgtgtgggttctgtgaactgtgccttggaatttctacagagttttgggaactttcttatcagaatccaagaattagaactcccatgtgagaactcattgtcatcccgtgcaagaaagtggaacagggagatcatctgtgagttgtcacttccccagtggtactggtccagctaaaggaagtacacggtgtgttcagggactatgtcaggtctacctgattcccagaggattctgtactatgtctgaatttggaaggcagcttacaaaggataaattccttagatcctatgtaacccaggcctggcagacctggtcatgcattgtgtttgctgtttatcttagtaaagtttgggaaatggcctactcctaagccacatgtgaggttctagcttcattagcaagatttctaggatcctattctaagttgcttttccctttcatctgcatatagcttgtactttcctttttcacagagttccctagcctcaaggcatctgtgttcctcattcagttcacccctggtgcttcctacatttaacaaagtcttgttgggaactgggaaatagagtgcttgcctagcatgcacgagcctggtaacttgtcgagcattcgttatgttctaggctgtaggcatagagcagaacatgaaacagacatggtccccggcttcttgagactgacttttgtcatttgttttattattcttttggagacagcctaagctattctccaactcactgtttgctctcaggtgctgagattataggcatgtgccatcatacctgaccatttcccaaaggagccttccctcacctcagatcctgctgtgtgaaccctggctaaatcatagctctccatgtgctctctgactcctgttgactctgtcattagcctgtgagctcctggagggtatgaattaagcatttacccgatacagacttgttcatgatgtaactagcaaacccttgtgttgggtaagccccatggctcagcacacaatgctagccatgccagtgcagaatgctgcttaaaattctctgatcttttcacagaaatctccaatctgctcgtagccactaagaaagcccaggagtggcagcctgtctactccatgagccagctgagctttgatcggatccttaagaaagatattatacaagtaagtccccactaagggtctttgtccaactttggtcctgacaccccataggggagccccctagagatttaagtgtgtgtgtgggtaaagtctgctttggggatattctagtggaaagagaacaacgaggtaaggccacgcaagcccacctttcattttacccagtcttgctgttggccttcccctgagagactaatccttgatggacttggatgaggaggtgtggactacctggggtagaggaatgggatcactaacatgtcagtagaggttggtctcaatggagtctccaccccacagagtgctgtgtaatagtgctcagtcctgctttttcagaagggacttctgaaaggaatagagagaagaacaaagactacagggcagggcagaacaagagctggcttcagaaaggggacccttggggagctcagagcattgccccagccttcctgggatagcctttgctacccagaatattcagactaagccagacccacagaggcgcttacacatctgcgggtagttgccaccctcagtagcatgtgtggttatgtaaaatctagtcttggaagggcagaactcatttcctagggaaggacactaaagcagaggcccagaagatgagtcaccaaggctctgctcggacagagagaactgtgttgatggatgctgacgtggacattggtctttgtgggttctgttacctagcccttggaattaagtcttcttctagaggagagtaattgtcttaaaagcatatgccttttatggaacgttctgggaatgcagcttcccataatgctgatggatcacctcatgacagatgcagctctaatgaatagttgcaggactttgccagagtacagcagatagggaggataaatggccactctgctgtgacagataacaagtggtggtatttgtgtaaattaatatacccgattaacagtggtgtctctttctgtagggaacaggcttcctagatatcgaccacaatccattttctatgtttgcaagagcttccataagagctcctgtctacaagctttgtggggctaatgttagcagctcaatattattatgttttatgaatcacattttgattttcaaatattagaaattaaaaatgagaaatattgaaactcagttccggaagggtccttagaaacagatcgttctgtgcatgggcttatccgtctggtggtaccgtcaccttccttcacgtgaggaaaaacccagcgcagccctcagcttgggctgatgcagacatgattgatgcttttcaagtggcttgtgcatgtcctggtgatgggtgctgccaagtggtggggcagggagtgggggagtggagcatgtactgaaaggctctgaaacggaacacacaggctgagcagtcaagttcctgcacactgtgtgtctatagcagaagcctttatacctaagctccttactcgattcactacattgcgacgcaggtgtcattaggactccatttacagagactaggctaagatcaagcaccatgaaggaatgcatcttagttgaaggccaggaagcatcagagcgagaggatgaaggctcctttacttttcctccagcctgagagtagagatgccatctggcagagtactcccataagtctctctggagagctggctgttagatactgttcacaggtttgtgatagactgcagctgggctacaggggactattgagatggagaacaagctgcttttcaggagcagggttgcaactaggtcaaggaaatgtcagtgctgtgcatgcccaggagctttgtgtttttctaggcacctgatgaggactgtatgggatgccctggccccatcccactgtgttcagtatcccattgaaaactcagccctgacctgagccatcatgaaggcatggtggaagagacggctttctgcttccttcctcagggtgagcaccttggcagaggcacaagaacacatatctattctgggaccctgctggactacaaggatgaggaaggaattgctgaagagaagaagataaaagtgatcctcaaagtcctagaccccagccaccgggacatctctctggcaagtgtgctccttctctggagctgggggagtgagttggctggggaaacctctgtgctttttggccatgtattcccagccttgtctttcagagttcctcccttcagtgctgtcttagccagactggctgtgtgggagtagtgaggggagaatgatggtgaggagggagcagcctcctgtacctgtcctgtgcccttccctgctaccaaaagcccttgtgtaatgctgtgggtctctggaaaaagctgagtggtctcgcactctgagggggtttcccaggctcccacatagttggcaacacgaatgtccaaaggagtcaaatgacttgaccaggaattcttagacttttagagaggacaaacactaagtgtggagcaggaagtgtggctgcctgcttgttgtaacatagtagtaggccttgtatttcacagcatttagatgagagtaaggtggacctagtggctgtgggaacattgggagggagcttatcccaccagccttactcagcattgttggattttctaaataaatcccatgccttagttagagtcgcccagaggtcgaggcatgtccgtgacaccagacagccaggagaacagtattcaagtgtgggaggtgacagtggtgaggtagcttctgggattcactgaaggatggtcccttagcagttcaggtatgagcctacacatctctttgttcttttttcccacaggccttctttgaggctgctagcatgatgagacaggtttcccacaaacatatagtgtacctctacggcgtgtgtgtccgagatgtggaaagtaagtttgttcttcctttggcccttgctggggtgctgggtgggtactatgcagacgccttgggttttttgccttctgtttataggagaaatcggggtcatttgtggaggtcagtggtggctctggttcagtttccctctttaacatttcgctcttgccactctgggcccaagtgtgcagacgtgaggcagtctagagggctggaggaaggtgatgcgtgtgaacctgactgagctggggataacctgctgaagagactcctgccagctcacctgttctgaacctctgctctgaatccccatagggatgtccaggaaagagagagaggtttatattgttttaaaccccagctctttgatctccaaactctgtagtgctgactactcttgtgttcgttcacatgggagacatgtattggagggaagttctgtcctatgggcaggcttaacttcgtgctgcagtgtatggggctatctataatgtagcagtggtaaaggccagcgttctgaagctttgtgccaaggccttctatgccttgtttaacaaatcacccttgtcctaaggtccctgggagaggtaagtattgctgtttgcacataaacagatgcagtcttttaaggtgagagagaatttcctctagatagacagcaggttccagaggtggctgtttctgtgtctgcagatatcatggtggaagagtttgtggagggggggccgttggatctcttcatgcaccggaaaagtgatgcgcttactaccccctggaagttcaaggttgccaaacagctggccagtgccctgagttacttggtaagaatgtttttgtgtagatccccattaggacctagagtgttctcttggggctagggagagtgggcatgaaggggttgcaggtgaggggtattggtaagcaggtagaagggaacctgcttccctggtgccaggttccaggcagaaggaaagagttctgtgtgtgggtactgtagtgtaggctttcctatgactcttgcctagaggaaaatgatatcatgttggagactgactgtattatacagctccaggaggaggcgcaggactgctttagtttgctattctgaggataaaacacaaaaactaacttgaggaggaaaagtggtatttagcttacatatgtattattgagggaagccaaggcaggaattggaacacagaccacagaggaaagctgcttactggcttgtttccttggggctgcttggtgtttctaatacttggctggtggtggtgcacagtggcacagcaaccagcaattaggaagatgcccccacagacatgcccacaggccaacctggtggacgcaatccttagttgaggttctcacttccctgctgtgacagtcaagataagctattatttagtacactgaatgaatacaggaaaaacactgtgtccattagagctaacaatgtgggcacacataccatgggccagctgctgcaggttttacatagtctaatgtgcacagagtctgtgaggcatgctctgccattatctctgttttgctgaccaaggaatagagatatctcaagcagaattcatgggtggaccaggctgtggggtctgctgtggctggagtggagaaagctgacctgtggggccagggttgtgggcagaaacagagggtgtggacagagaagacaaggctgccttactacatagaccctttttattctacaggaagataaagacctggttcatggaaatgtgtgcactaaaaacctccttctggcccgtgagggcattgacagtgacattggcccgttcatcaagcttagtgaccctggcatcccagtctctgtgctgaccaggcaaggtatgtgtctggtccccagtttccatcccccttccatctccaccatctccttctccactaggcattgaccaccagcaacaagaagagctgtgctgtgctgtgctgggcctccctttagaaagggatccagcagacaggtgcacagttgctgctgctgtgccctgggtaggctgtagtacagagggagggtagaatccaacggcctagtcaacactttctagtccttgtggtaaaggggctgtgtcaatggtgctggcatagcacagcgtccattggagacatggtgaaatggtcgattggtgttgggcagaagccagatgtcctggatcttcccctgctgtcttctggagcctggctgtagccattgggcagtttggaagttagcacattacctttaatcaagagactgcagagattgtcacccttgcaggaggttaagttatgtcaagttatcagctcgagaaggagcagcagcccctggagccaagacctgaagctaatgcttcccaggctgcgctcagcctcagggacctggtctattaaagctgctgctaccttcagtgttgagtttagtaacttagcaatcatgtagtaagagagtagaaactgtgacagagaataagccctgaaatagccctaaatacccactatttagagggagagcaggagtcttttgttctttggagcctgatttgtgggtatcatgtagcaatcattcagtaatccttgagcagacacccctgtcaagggtcttgaccttggtgaatcattgatgattctagtgtaagcagagaggcctggaatccagtgatgcccacaatccagagtagatttgggggtgagacctagttcaggaaagttgtttgtgcttcatgaggctgttgtaggcctctgaggtagctatggcagggcactggtgcatagctgtgcaggacaggttaagaggtttgggaaggttaagtgggcttgagtccgatgctaggctcatgagccacactgctgatcgctttccttgataactaggaggttgctctgtggaggtaactgcattactcaaagacatttccaggggacatggcagaagcttctttgagattgctggctctgaccttggttagaagaagccagaaactgaagcctgagagattatcaggagaaagagatatgtggctgctttttaaattttaactttaaatatgttcttctgtcctcttgaaaagaaggaatacacttaaagttaacattaacagtgtggaacatagaataggatgtgtgtaggtagccgcctgcctctgcacgctggacttcctccccactcgtccctttttctttccctggcctttgttcagacacttgctcttccgtgctttctctgtctatggcgttctgctgtttttgacaccaggttttaaaagatggctcctctggggtagctcgtggggtagcctttgtgctggccttgatcagaccacctaggttgctgtgtgttggactcaccataggacttccgtggccaggaattatgcaggctgcaggcccacccttgtagctgcagaggcagtattttgcatattaggtggtcccaggagctggcctataggtgggtctgttgtctttccccagagtgcatagagcgaatcccctggatcgctcctgagtgtgttgaagactccaagaacctgagtgtggctgctgacaagtggagctttggaaccacgctctgggaaatctgctacaacggagagattcctctcaaagacaagaccctcattgaggtgagcacttgtttccagactgaggtggacaagatctcagatgctcatgggcctgtgagcttggtcgtcttacacttgtaagtaaccttcagcctcggctccataaaacgggaataaataatgactcctctgtcgagtccttaggaaggtagacaggcattgcacagctgcagtataaaaacgaggctttaaatgagtggagctcctggtgtgtactgactgccctagacaggactgaggcttgggccttcccctgaggactgctaaggcttgcagagggttaagctcagaaatgaaagatataaatattttttaaacggtcataactgtgccattcctgactgactgctatgactttggcctggtgaacatgtagtttttaatttactgttgtgtgagcacttcctcgtgggaacttagtgagttaattggcgcgtccagcgctgacttccttccgtagctcacttactgtggtatttacagtttgctctgtctttgtagggtaagcatggctcgtgtggtttgtttctgagcagtgtggtaattggaattagtgggtgagtgaggaggatcaggaaggctgctgctcgttgccacacaattccagagaagctgccgggcttccctagaacacagcaccttgggagtgggaggtgctaccgtttctccttgaatctgggatatgtcactatcacgactgctttcctcatactggaaagaggccactgaaaccccacattgaggacatttgccttttggcagagacactggggattgaagtagggattggcagttgtttctgaaggtgtagagtcgaaggtctgagggtgggtacctggtctcccaatcgtcattcttttttacagaaagagaggttttatgaaagccgctgcaggcctgtgactccatcttgcaaggagctagctgacctcatgactcgctgcatgaactatgaccccaaccagagacccttcttccgagccatcatgagggacattaacaagctggaggagcagagtgagtctggccagccagtcccagcctcagagactgctggggcagggagggtggcagtcctggttactgcttggaggctaatctgtttccttgtctcttcacttagatccagacattgtttcagaaaagcagccaacaacagaggtggaccccactcactttgaaaagcggttcctgaagaggattcgtgacttgggagaggcaagttacacttgggctctagcctctgtctgcatggacagctgccatattcccctttgtccttcgtcagaggctttaagagaagcaccttaatgccctttgtcaagggacacttgaccatgccaagttaggtgtacctgcatgtgaatgactgcataaatacccaggacctgggacagcttcctcaagtaccttgacttttctctgtgctgtagaggagggccaagcatagatgtagactaaacgggagcatctctaactctgactcttccaagattatactgtgattccttacataaggagagtgccaagatatgagtcacgggttttcctttgagtagcagctggtgtgaccacgggagttcctgggttggtgttttcatatagatagactctcagacgctcacttaacatcatgactgtactggactaacagcatctgtactgggcattttcacactcgtccgtcatcctcctactgataagtggcatatttgggatttgaagctcccctgtgcaaatgctcttttgagccctgctagcctgtcctatagcatggacctgtgactatgaaagaatgcctcagctgtcctccgaatgcagaggtggcctcattgctggagagtacactgtcttagaaactgggattgatgggtaaagtggtcccttagtcaccagctgctttcttagtcttcgctcagtagcagaggtcattgagtcaagtgaggatgagctgagccgagaggagtcaggagatcagaccgaggtgatgcttgtggccgtgagagacagcctgagaacaaggcatttcctcagcggatctagcttgtctgggcatctctgatagcatggacatattccttccagggtcactttgggaaggttgagctctgcagatatgatcctgagggagacaacacaggggagcaggtagctgtcaagtccctgaagcctgagagtggaggtaaccacatagctgatctgaagaaggagatagagatcttacggaacctctaccatgagaacattgtgaagtacaaaggaatctgcatggaagacggtatgttgtgcacactggactgtgggataaaggtccagtggctctctgggtcctaagggcatttgctggtaggcagtccgcagcttcatctttaccagctcctgtgggctgtcagacattcaggtctcacaacaacaaggtccttaccaactgcaggcctcctgggaggcttctcccagccgcaggatgtgaactttgtctttcagattcacgtataatgctgggaagcatcccagatagccacacttgtgccataaggaagttaaactactcacccccattcctcttctgatctagtgctacctaaggccttctgctctgtccttattgaagctaaggtagcaaatagtacttagtagtcacatttactaatactgtaccttatctgcaaggcagtcatgcatgtgctttaaaactagtaataagagggtatggactatgattttaaaactgatcgcttgtctagagattcacaaagcactaggactgcagtaccctgatgaggcaggacctggggctatggactcctgtttatcactgaagtgtctgtgcctgtggtaggctcttcttccccatgcttcgggggctaggctgaccttccacccccaggccctgtctacagagccccatgctcatcctctctgcagcctcatctgatgctactttctcctaaataggaggcaatggtatcaagctcatcatggagtttctgccttcgggaagcctaaaggagtatctgccaaagaataagaacaaaatcaacctcaaacagcagctaaaatatgccatccagatttgtaaggtaaaaacaccaaacagaaagaaacagcctgttttttttaaaaaagtaggcattctgtcctggggaaatggttagtaattagacctcagcgggagcctgtaataaatgaaccgtgtttttaactctgcaccatttgcatgaaatgtgagcagtggactttacttggaccttttttttttttttaattgtttaattttataacaaaaactgttagtgatatggggatgaaatggctttttttcctaattgtgctgtggaagataaaaaaaacacaacctgaagtgactttttcagtgggtctgacctactgctcttaggggaaggactgtgggttatcaacagcacatttaccttcgcaatgggcctgagccacacttttctcttaggggatggactacttgggttctcggcaatacgttcaccgggacttagcagcaagaaatgtccttgttgagagtgagcatcaagtgaagatcggagactttggtttaaccaaagcaattgaaaccgataaggagtactacacagtcaaggacgaccgggacagcccagtgttctggtatgtaaaccagctcggccgtgctttgtagcttagcattgtcttgaaggctcttgaagctgtgcttgggtgcgtatcagctgctctgagcttttggagaatgggagagtctggccatcatcacttcagcctctgtagcttcatgtgagcaagccacacccaccacagttctcatagctgtgagcaggtggaagaggctggctcgttcttaatacatccgtgtagaagccctggagggatcgcagggccacaggtacacattgccatagtcgtggagatcctgcaagagggatagatacttggctaggttttaggaaccactagttaccgtagttagcgagccacgccctgaccatcattgtctctcagttgggaacaccttcctggggaaagctgcctgtgtaccctgatgcctctcatgcagacatggggccctctccaccagcaaagcctatccagagtcttccttcctcgtttaaaaacggagtggttttgaggcccttgattgtgccagtgaatcctgaattatgggtgaggcagccaacttagtgtggcagtggcacaggcttcaggcatgggtttgaaaggctgtgtgtgattgggtaaaagctgaagggaagggggcatggctggagctctgctgttctgctgacagagataagagggaactgaaagcacgtgtgtcattgggaagtgctgtaggggtggctgagtcagagcatcaggacttgaccagagttgaaggacacaaagtctgtactgaaggtcaccatggagaggaacaagaaaggaacaagggaatcggggtcagctgcttcagtagcccaggaaggacaggttgggacagtaggaagtggatttgtctgaggagtgttcaggaaaccagttctgggatgcctagacacctggtatgggcatttgggcatcactcaccaaaatagtgatgccagagagggtgctgactcctggcttacagggatataacttggggctcatcttcaggggactgtcccctctctaaaagaatgttccctgggacacgaggaacacagatatctcgtttaagggcaagtaagatgttgctgtgagcctctggactgctgtcccgtgtgctgtgtgcactgtggcagcatgaatggccagagtccctcagaggcacgtgacttacattctcaagaacagggaagtggctttcctgaggcactctttttttttttttttgggaggaacaaaaggctcactccctgctttcctttcaggtacgctccggaatgtttaatccagtgtaaattttatatcgcctctgatgtctggtcttttggagtgacactgcacgagctgctcacttactgtgactcagattttagtcccatggccgtaagtgttaactgctacctcttgtcagtgtgccacatggagagggttacagcatgctatctcacatggtctggcaaagtttgccttcacaagtgcagaattcagtaagacgactcaggtttttagggtgagggtcatcacaagagagaatgatacactttgagcattgccgtaggggttttgttttcatacgactgacagctgtggttggtcccctcagatgtgctgttatggaccaatccttgagagcgcaaataagggttttagattttcatttgaagttatggaagagaaaagctttgttgctttaatttcttcttacttctgaaagcatcaccttaattttgtttggttttattttacatagttgttcctgaaaatgataggcccaactcatggccagatgacagtgacacggcttgtgaatactctgaaagaaggaaagcgtctgccatgtccacccaactgtcctgatgaggtagctgtgtccccttcatgggaagggaactgcattttgaatgtctttacagcttgccttatccagcatgggaggggaataacagaaccgaaggccttacactggctacagtgttggctcttgcttaagagtactcgctattctttctgaggtcctaggttccatttacagcatccacttgggtaagacatgagagaaatccctcctgcgggggatgatatgctgctcaagcaaggctcctctcagggagctgtggcctccataccgtgcatgtctgccttcccagaagagcacatgtgatgaggtcttaccattgcctgaagacatttaccccactcactagcattttcagttttctagattctaaactggatcaagcctccatagatactcaggactgtctggtcagaggcaggtgcagtggtggtgaagggggtaggcagattagtaactttcctgcccctctcacagggtcacaatagtgacctggattttgttgaaaatcagttaacctgtgagttaaacaaatgataataccatttatgaactattattttctgcattttaagttgctcaaatactcagttgtttagtcttgttaaaggacagcagtttctagcgtattcttgataattttgtgtttttgaatgtgtggatgcttatggatgccagagactgagggatgtgtctgcttggttgccccggctttgtttgctgaggcagggtctccctggagttagtccctctggctttgcgaggctggccagtctgccttacagctgctacccacgcctcgcctttaaactgtgtgtcatgctctgaactttaagttacactcgtggggcaagtacgtgatccaccaagccaactttccagcctcttattgttcttttagaatctctcaaatctgatattattcatactgttcttgcttttatttttcataggtttatcagcttatgagaaaatgctgggaattccaaccatctaaccggacaacttttcagaaccttattgaaggatttgaagcacttttaaaataagaagcatgaacaacatttaaattcccatttatcaaatccttctctcccaagccatttaaaaacgttttttaagtgaaaagtttgtattctgcctctaaagttcctcaacaaatactcgagttacacatatgcatatgtcacactgtcactcagtgtgtggatatgcctatgtcacactgtcactcagtgtgtggaactttctctttaaaggtgtaacatcttaaatttggtgatgaatagtgacaaccaaaagactagattgtgcctaagcactccttctggaacaaccgaatgatcagctgcatagcaaaggactgtgccgctggcatattgatctcagataaaaacttgtggacttggctgacactctcccttgccctgaaatctcaatgtctattcagtgatagtacaagcacgtagataccacttagtatactattgtttctattaaaaaaaaaaaaaaaaaggtctgttcctgctaccttttaggactgaagttttaagcactggtacccactgtggggcaaacctgtgctgcaggagggagcctggcatacacactctgcatgttacttcttgagaactagacctgtgtgcctgtgttttcctgaacagctgctttctgtcaggcagactcctctgacctggatgcggtcacatccacctttaagattgtcagtgcatactccttcctgacgatcccctggggcaagctgccgacagtggcgtaaacaggagacatcaccctatactgcgaaactacagaaaggaagacagcttggcccagcgggctgaagttcagaattcactaggtagttgttgttggttgacttggaggtagctgggtaatcaacagctttcactttagattcaatgtgaaccgcagagttactcatgaccaagagtctggcaaactcattaatgctgtttaatacttgtttgatattttttcaccttttgagcccttttcccaaagaattcaatatcagtttagtagcaacagtacagttgccatttaaattggtttagttgctgtatatcaccatagcccctgtttacgtcaaacctgtgtctcgctctatatgcactttgtttactctttatacaataaacatactaaagacttcacatgcatatgccttttaatattaagcttgcatcttgaaaagcatttcaaaccattagctgacacagaaaactaacagcgtagactttggggggttggttgtaatgaccttgtactaacatcacttgatttgcatttctgtcttgtaataacgggcacaggctggcatagtggaggacccacatggaatgtgaagtgtctctaagttccctccactgcttcctcctcacactgcagctcccagatagcagtctctagcctccactattctgtgacttagagctgcagccagaggcaggaggtgcagggtcagagcacaccattagtcatctgctgggacctcgtgctggtcatcacctataggaagcgtgtctaggacggtcttcctttcattttttagctgtcattttttcaatgaaagctggtatatgcaataaattaggccaggtaaaattcattataaaacatgtaacatatgtaccagttttagattttataattaatgctggagagcattatcagtcaaaaatgataagtcctccaaataaggttttttaatgatctgatctaggatcattgagatcctacacttcatcagttgtagtctcttaacaatgaacacatagaaatttctagatggaaaaaggttgctcacttaataccaagatcttcggcaaagggtgaagtcaaaagtcagacaaataaagacaagtgttctttcagaagtgaattggattaagcggccatttcctttcagcttaacaactaccaaagagtgagtaaataaccagagtgaggtagagcctgttagctcagaactgccccacgctgtccacggcctccctcaggaagggctgtgtgcactgctctgctggggctcggccctgtctagggacgagaccttcactgctgtatgctatgagacggcagggaaaccctggctccttgctatgcacatctcccataagataaaaagaatagggagacagactaagggcaagagagtaaacgcccctgccattgcaggctctgtggttctcgaggctactcagttcccattgtgacacaaaagtaactacataatatgtaaatgagcaagcctcactgtgttcccaacatcatcttggggacattgaaactgcagtttcatgttgtaagtcctcccctacccccagacgtttagaaatgtcctcacttgattcacaggcagcacaaagctaggtggtggactacatgtggccctagtgtgtattctgctaacccttgtattatgtacaaaagttacttttcctgaaatactttgttttccgcaaaaggtgtatatggtaaatgatactccggaagtgaagcatctgaagtcacatcactttcactctgccactgggttggtcttatgtggctttgtagagctaatggaggctgcatgatgagcatctgttgtcaccactgggtggtactgccacccttgcagtttgaggaaagactacagatgagactatttttaggggagagtaaggtaaatgcacattggcttatacgaaattcattctaaggctaaggaaacaacagtttcccagttattgcttcagactttatatatgatgtcaaaattgttcccaggcccgaaacaaggactattggaatgctgactctcctgtgagcggagtccttatcacgtggattaagacacatctaatgctagtggaaatgccctcgaccagtggtgtttcttattgctaggtgggtatttggctgatctgcctgctgcatgacagttccttctgggaagtcagacacccgtatagaaaggatatggctagtgtgaatgaagttaaggcagcgatgagcagcaggcgccgcgccgcagcaggcgggcaggagacccggagcttagtacacacgcttctttttcaagtaggtttctgtgtagctcactccggtgtcctgagggtgctggccagcgagttctaccgggcctccttctggggcagagatgagataggaggagcctcgcttctcattcctcaaggaggatgcctgtgagaaagtcagtgaagatgtccgtgagaaaagcatgctatcctcagttggtgtgaggacagaatcccagaatcccaaaaccgagaagaaatagaaaaccacctttgttgcaggaattagactttcaagtctctataaagtcacccgtggagagcctggtatggttcagttgaagagcagcctctggccctgcactccaccccagcaccagtcagtcccacctagaacctgagccctcacctcagttctgggatgtgggaggaggaaactggtcctattcacacctgaggcagaagagcagtaccaagcatctggctctgatggaggatgcaggctagcaagtggggagtcgtgttaagtatgcccattgactgtgtgcaagaacttgtcagagtggtgtcagggaaaatgacagcactaccaacagtaatggtcatctcaaaactttggggccccaaataatcagatttccaggctcccttcccgagagtctgatctaatgttccccataacaggccacattaatcagtacaatgatatcctgcagcctagcacgtgacctttccctacaaataagtgtgaggtgcttgctgaggccattataacagcccagatacacaatgtgagaacagctgatggggagggaggtcagctttctaacactggagagttctcacattcggtgtctttaaacccttaaaaaggttgcgtcataggttgcatttgtcctcccatcatcctgtcaagaagagacatgagagcccatgggttgctcagtggcatagccattgcattgggtttcatttggagagagaaaaaaaaaaaaagaggcagaatgacagacccaccactaaacagctacgctgcctctctccctcaatcctcttaagtgagtccaaggcagtggtcctcagcctgggtcagatatcctgtatatcagatatttatattacagttcatatcagtagcaaaatcataggaagtagtaacaaagttttatggtcgcgggtcgccagaacctgaggaactgtattaggaagtcacagcaataggaagggtgagaagcatcgccctaagggattattcacaaagttgaacaactgcatagcatttgcttggaaactgtggaggtgggggcagggaggaacacagatgaaagtagtcttaggttgacaatgtaggcagcttttccccggctcacgcccactgctgagcccagcatctcccagcaattggaaagatactggtggctccaccttagccactaaaaccgctaacctgcagctcgttctgcaagtgagattttcccaaacatgaggggtggcttagggtttacttctgtggacagacaccatgaccaaggtggctcttataaaggacagcattgagttggggctggcttaataggttcagagcttcagtccattagcatcaaggtacatggcagcctccaggcagacctgggacttctggagttgagagttctacgtcttcatccaaggcagacaggagaagactgtcccctacgtggctaggagggactcaatgcccacctcacagtaacacacttcctccagcaaggccactcctcctagtagtgccactcccttggccaagcatattcaaactgccacaaggagcaagatgcaaacacctctcacagtgggcagagctcccctatgcctccctctctccgtgctgcatggtgaccacgttcatccttaaagcaagagccttctagatcgtctttattctcccaaaccaggcagacactggatgttgttattcaaatggctctatatcatccagagccagccaacagagaccgaagaggtgagcctgaatgtcagagaaaaacattagttaagaatgagaaatgaaaaatgcccttgtggctcatacagcagcggagaaggataattctgacttagtacatcaaagacggctagctttgtaaggattagtgagtggggaacaacggtagttggaggttttgaagcaagcacagtagtctgagaaaaacaaactcgtaactaaaaatgagtaagaaacatttaaaaattgccacaaagagaaaaaaagcacacagatcaacttcctcttgtctgtcacagcatgcggcgtctcttccttcatacccttcaccttcaggtcttgggccctaggcttcaatgaatgaatgaatgaatgaatgaatgaatgaatgaaaacgtgcacttggctctctccaaactcctatctgagggctttcctcagttactggagaggagtcggtaggaaaggcacttggcaacaagagtcatgtcctgggctctacctctgggggccacacagtcctctgacctccacaagcaggccatgacgtgtgcccttccatccctgtgcacaaaataagcattttaaaaaatttcaaatgcacttgaaacaaagctcaccctagccctgtgatgctacccagctgcagctttgggagccagtagctcgccctgcagatgcagcacacccaggtactttctgcaccgtagcacatttaaagttcaaaacgctgtcccaggacagcagggaatttagaatgtaacatgctactagcagagtgtggtggcagataccttcaagtcccagcactgttaaggatcccagcttttagaaggcagaggcagagggatgtctgaatttatggccagccaaggtacacggtaagatcatgtctcaacaaaacaaaacaatttaaaagttgtgggctggagagatggtttcatggtaagaaaacacttgctgctcttgcagaggaccaggttcaggttccagcaaccacactagggagctcatcaccttctcaatgtccagattcaagagttagactccctctgctgggctccatagtcacctgcagccatgcagtataaacactgacaagcagtctctctctgtgtgtctctgtctctctctcacagacagacagacagacacacacacacacacacacacacacaaagtataacctgctgatttggtgaaattgcaccagcacaagaacatcccgtcaggttgctttcacaacacttcactaggcctcatccaagagccgtcgctcccccgccccccaggatgggccctttccagaaaacattcatcttcagcaggattctcctcaggatgaggtgaaaccgcctatcatgattcttcctgggctctgatctttggaaccacgatgtgaggaggcggcttcctgagtgctgtagttatgatgtcaacaatttccactcccctctagcctcccgcgggggagcccggcatcttcactcttagctagtcagctatctcaccaagaagatgagaaatccagagagttgacaatgactactggactcctggccctcaacccttggcatctcaacctcccacataatttgtgacaacattctccctgacatccagattcctgagatagatggccaatcagcaatgaacatcatacgggaccagccaggcaaactaaatctcctcccagccccccaaaacccattctacccgcgttcctacccatctcagccagtgacaattccatttttccaggtcctaaacctatgttctggccttcctatgttctttagtcatagcttagaataaaatcctaagtacacaaaggacctaacaaggtcctacctgtctgccctgtccccacccactgagacttctccatttccatcttgccccagcctctcctgctgggcgctctccctccctttgttcctttaacaaggtaccaagtttgtctcatgcatctctgcactggctgttcctacttgtgggactgtatgacaccgacaactgtgtatctataagactcacatttgcccccaaaactcacctggcaagtcactgtgtcacatttttcaaaaatgaaaaccacccggaaagtctcagtggccacaactgtgtaagttagacaccttaagttcatttaatggtacaaaggaatgtcctgtgtcacataacatgatgtgctcttgcactgtttgcccactagatggcagcattaggctctctaaggagagaccgagacgcttcattgctttttagttcatttttgggtttgcggccaccctaactcatcacacattctgtagccgattccctgggttggacggccagcttcccagcaggaaagatccatgtaaccagggaaacacaagactatggcttggcagtgcaaaggactcctgccagtgagccaggcggctgccccaagccaagtgtggaaagaaaaacccaaatctcagtttaatggtcagggaaaacggtgaagggattcctaaattatccttcatattactgaaactaatgattacgccatgctgaaaaggtactttttctacttcaataaaagggggcaggaaggaatattctattgttttgtcagattgtagttagaggctatactcgggcattaaatatttaataagctggctcatgggctcctgtaacatggacgtataacacccatctgatgcagacagacctgttcatctttacctcagactctgaaatatcaaactgtctatagctatccaaattaaaaagatctttcagctaataatgctattagactttaaaataactccatttgtttctggcttcatttttcatcgtccacttcaaatatctaggacatgtaattttgggaaaaatcagctgcatctcagtgttgagtacagtaactatagccagggatgtggggaggtaactacttaaaatcagctgcatctcagtgttgagtacagtaactatagccagggacgtggggaggtagctacttaaaatcagttgcatctcagtgttgagtaactacagccagggacgaggggaggtagccacttaaaactggcttctaaggagctctagattggaacacgccgggttaacgtggttacggtacgcactttggaacttcaggaacactaagtaaatatgcttcctctatttaggataactaaggtttgtttctaaactaccacactccagggctggcaggatggctcaacagttaaaagcgtgtatactgctcttacagagaatgtaaggtccgctcctagccccacactggtcggctccaagagaatctggttcaccctccctgcctctgcaggcacctgcttacatgcacatactctgacacaaacacatatgcatataagtaacaagtaaacactgaacatatcgttagtccagtgtttgtttctatgtacagagctggaagactcagtctgaccccagagtatccccgcactgccagtgacagccgctgactctccgtctgaccccagagtatccccgcactgccagcgacagccgctgactcttcctctgcactcccagagcagtcatctgactttccctacagatttacttattctgaacactgcacataaacagaatcatacatgtggcctctttggcttacttcacttagcatgcttttgtggttcatcatgctgctcatttgcttgctaacttgtagacaactgggcctttccattttggctgttagagataatttaccgtaaacattagtgtataaactggtatgtagatacattcaaattctcttagcacatatctacaagtcaaactcttagtttgaggaatgctaacttttactgacagttcaccatgcctttgcccatatagctgtgactctttttccttccagtttcttggtgtgggtcatctcatatgacctacattccatgcttgtcactcttatccctgctgacatctgctgcagtcccttaatgaagtttttattatgttgacagcctgcttggtgtggcccagctcccacactgcccaaggtcgttctttacatatgactcactttaattctttataccgtcgtctcctaagtccaacacccaggagaccttatgagcattttgtattacctgcttcccctgtgcacggtgtcttagtcaatgttctattgttgacatcatgaccatgggaacttttataaaggaaaacatttaactggggctggcttacagtgtcagaggtttagttccttgtcatcatggcaggaagcatggcagagacggtgctgaggaacaacatggcagagatggtgccgagagatctacatctggcttggcaggcagcaggaagagagacaagaggcctgtcttcaacaattgaaacccaaagccacacctactccaaaagaccacacctcctaatcattgtcaagtactgccactccctaatgaccacgcattcaaatctatgagtcgatgagggtcactgctattcaaaccaccacatttcctgacttgtctgattcctctctctctctctctccctctctctctctctctctctctctctctctttctgttctattgatttttctgttgttgttgaaaactgaagatcatttaaatgaaatgatgtggtgactggaaatgaatctacaaacccctctcttttgttactgttcagtagcttcttttgaacttgtgaaaagtcagttctcctggctgtgtgaactgctgttatctgttaatggctaccctatagattgcgatgcacattcatgcacaatgcagaaaccttcaaatccctatttcacttgctccattctggccctggcattagggctgtaagataactatctgcatgcattacagtgtcaacgatgctctgtactggttccctatgaactcaaaggggggaaacagttgtcatctgcacattttatcagtcctgacagtggctctcgctgctggagaggctgctagacaccatgtgatgtccagggaaggcccagcaattattcaaccccagatgacactggtgccaaggctgcagtctctgagacaatacgcattgttgttaccccgttactgtctagatcatctctctgtaagtctgactcctgtacacgatcgtgagttcctgatttacgagaggggactctgctcatgagatctgtgttttttgaagaaaattttgatcgttcgtttttcaaacattttatactccattaaccgcatctcctccactgatatgcacttctagctgcttggtctgctcccggggctctgaagagcctgctcactggtttccactctctcctctgcctgctgcttttctagtggtgaatctttccttcctgtctttccagtcctgtgctgttcccatctaatgtaatctttaatatcacaaaacaactgctaggcagtggcgaatgcctttacttccagcactcaagaggcagagcgaggcaggtctgaatttgaagccaccctggtctacagagtgagttccaagacagccagggctacacagagaaaccctgtcttgaacaaaccaacaaaccaatcaaaaagagagagagcgagagcgctaaacaactcctgtcagttctagaattattaaattcttttatagtgtgtaactctctgagaccccctatgtgtccatgatgtcatcatgttatttgccatttatgttttaatgtcattgtttactgataccaacacctggtcattgcggctccatctccctcatgaaatgttttatatctgtaggttattttacctacatgtatgtctgtgcaccacatgtgtgcctggagcccatggaggccagaaaagggccccaggcactggagttaacagacggttatgagagctgccatgtgggttctgagaatcaaacccaggtctgctggaagagcagccaatacccttaactgctgagccaacccttcacccccaacttcatagttaattgtgaattactggatgctgagaacgagaaatggaaaaagtacggactccattatcttcctctgttgaggacagtttgttctaactcagtggttcttagccatcccaatgctgcaaccctttagtgcagttcctcatgttgtgctgacctcaaccgtcaatttttttttgtgtgtgtagctaattcataagtgtaattttgctactggtaatataaacatctatgttttctggtggtcttagggaacccctatgaaagggttgtctgttgcccaaagggcttgtgacccacaggttgagaaagttcaaaatccaagtgtcgcctctgcgctggacttcaccgaccatcaagctttggctctgacatctccctgacagcagcggttcagtgctcagccaactaggttaggctggagtttcacgatggctccggggctcctacccatgtgcttccctctgttccaggactttacagcttcacagcccttaggcttcctctgtgactcaggtcaccagaagtgcagatttgcattgagtcaagcaaagagcctcagaaacatgactgtcccccaggggaattccccttgtcaggacctgacacccttcagcgtttgctgaagtattccccaacgctttcaaacagcagctgcttttttcaaatgcactccagattttatcagggatttaataacaataacttcatattcattagaaacaccaagtagcaaacccttaaatggataactttacttcaaagtgaaatcatgccatctactatctgacacaaccgtctgtcacaatccttatgcccaagaacctaaacagagtttccaggagctactactgc

SEQ ID NO: 863 - DNA, 4585 bp, Mus musculus
agatcagctctgaatgggctttggaagtatctaaatataaaagaggactgcaatgccatggcgttctgtgctaaaatgaggagcttcaagaagactgaggtgaagcaggtggtccctgagcctggagtggaggtgactttctatctgttggacagggagcccctccgcctgggcagcggagagtatacagccgaggagctgtgcatcagggccgcccaggagtgcagtatctctcctctctgtcacaacctcttcgccctgtacgatgagagcaccaagctctggtacgctccgaaccgaatcatcactgtggatgacaaaacgtctctccggctccactaccgcatgaggttctactttaccaactggcacggaaccaatgacaacgaacagtctgtatggcgacattctccaaagaagcagaaaaacggctatgagaagaaaagggttccagaagcaaccccactccttgatgccagttcactggagtatctgtttgcacagggacagtatgatttgatcaaatgcctggctcccattcgggaccccaagacggagcaagacggacatgatattgaaaatgagtgcctgggcatggcggtcctggccatctcccactatgccatgatgaagaagatgcagttgccggaacttcccaaagacatcagctacaagcgatatattccagaaacattgaataaatccatcagacagaggaaccttcttaccaggatgcgaataaataatgttttcaaggatttcttgaaggaatttaacaacaagaccatctgtgacagcagtgtgtctacacatgacctgaaggtgaaatacctggctaccttggaaactttgacaaaacattatggagctgaaatatttgagacttctatgctactgatttcatcagaaaatgaattgagtcgatgccattcgaatgacagtggcaatgttctctatgaggtcatggtgactggaaatctcgggatccagtggcggcagaaaccaaatgttgttcctgttgaaaaggaaaaaaataaactgaagcggaaaaaactggaatataataaacacaagaaggatgatgagagaaacaaactccgggaagagtggaacaatttttcctatttccctgaaatcacccacattgtaataaaggagtctgtggtcagcattaacaaacaggacaacaaaaacatggaactcaagctctcttctcgagaggaagccttgtcctttgtgtccctggtggatggctacttccggctcactgcagatgcccaccattacctctgtactgatgtggctcccccactgattgtccacaatatacagaacggctgccacggtccaatctgcacagaatatgccatcaataagctgcggcaggaagggagtgaagaggggatgtacgtgctgaggtggagctgcaccgactttgacaacattcttatgactgtcacctgctttgaaaagtctgaggtattgggtggccagaagcagttcaagaactttcagattgaggtacagaagggccgctacagcctgcatggctctatggaccactttcccagcctgcgagacctcatgaaccacctcaagaagcagatcctgcgcacggacaacataagctttgtgctgaaacgatgctgtcagcctaagcctcgagaaatctccaatctgctcgtagccactaagaaagcccaggagtggcagcctgtctactccatgagccagctgagctttgatcggatccttaagaaagatattatacaagccttctttgaggctgctagcatgatgagacaggtttcccacaaacatatagtgtacctctacggcgtgtgtgtccgagatgtggaaaatatcatggtggaagagtttgtggagggggggccgttggatctcttcatgcaccggaaaagtgatgcgcttactaccccctggaagttcaaggttgccaaacagctggccagtgccctgagttacttggaagataaagacctggttcatggaaatgtgtgcactaaaaacctccttctggcccgtgagggcattgacagtgacattggcccgttcatcaagcttagtgaccctggcatcccagtctctgtgctgaccaggcaagagtgcatagagcgaatcccctggatcgctcctgagtgtgttgaagactccaagaacctgagtgtggctgctgacaagtggagctttggaaccacgctctgggaaatctgctacaacggagagattcctctcaaagacaagaccctcattgaggtgagcacttgtttccagactgaggtggacaagatctcagatgctcatgggcctaaagagaggttttatgaaagccgctgcaggcctgtgactccatcttgcaaggagctagctgacctcatgactcgctgcatgaactatgaccccaaccagagacccttcttccgagccatcatgagggacattaacaagctggaggagcagaatccagacattgtttcagaaaagcagccaacaacagaggtggaccccactcactttgaaaagcggttcctgaagaggattcgtgacttgggagaggcaacatggacatattccttccagggtcactttgggaaggttgagctctgcagatatgatcctgagggagacaacacaggggagcaggtagctgtcaagtccctgaagcctgagagtggaggtaaccacatagctgatctgaagaaggagatagagatcttacggaacctctaccatgagaacattgtgaagtacaaaggaatctgcatggaagacggaggcaatggtatcaagctcatcatggagtttctgccttcgggaagcctaaaggagtatctgccaaagaataagaacaaaatcaacctcaaacagcagctaaaatatgccatccagatttgtaaggggatggactacttgggttctcggcaatacgttcaccgggacttagcagcaagaaatgtccttgttgagagtgagcatcaagtgaagatcggagactttggtttaaccaaagcaattgaaaccgataaggagtactacacagtcaaggacgaccgggacagcccagtgttctggtacgctccggaatgtttaatccagtgtaaattttatatcgcctctgatgtctggtcttttggagtgacactgcacgagctgctcacttactgtgactcagattttagtcccatggccttgttcctgaaaatgataggcccaactcatggccagatgacagtgacacggcttgtgaatactctgaaagaaggaaagcgtctgccatgtccacccaactgtcctgatgaggtagctgtgtccccttcatgggaagggaactgcattttgaatgtctttacagcttgccttatccagcatgggagggctgctttctgtcaggcagactcctctgacctggatgcggtcacatccacctttaagattgtcagtgcatactccttcctgacgatcccctggggcaagctgccgacagtggcgtaaacaggagacatcaccctatactgcgaaactacagaaaggaagacagcttggcccagcgggctgaagttcagaattcactaggtagttgttgttggttgacttggaggtagctgggtaatcaacagctttcactttagattcaatgtgaaccgcagagttactcatgaccaagagtctggcaaactcattaatgctgtttaatacttgtttgatattttttcaccttttgagcccttttcccaaagaattcaatatcagtttagtagcaacagtacagttgccatttaaattggtttagttgctgtatatcaccatagcccctgtttacgtcaaacctgtgtctcgctctatatgcactttgtttactctttatacaataaacatactaaagacttcacatgcatatgccttttaatattaagcttgcatcttgaaaagcatttcaaaccattagctgacacagaaaactaacagcgtagactttggggggttggttgtaatgaccttgtactaacatcacttgatttgcatttctgtcttgtaataacgggcacaggctggcatagtggaggacccacatggaatgtgaagtgtctctaagttccctccactgcttcctcctcacactgcagctcccagatagcagtctctagcctccactattctgtgacttagagctgcagccagaggcaggaggtgcagggtcagagcacaccattagtcatctgctgggacctcgtgctggtcatcacctataggaagcgtgtctaggacggtcttcctttcattttttagctgtcattttttcaatgaaagctggtatatgcaataaattaggccaggtaaaattcattataaaacatgtaacatatgtaccagttttagattttataattaatgctggagagcattatcagtcaaaaatgataagtcctccaaataaggttttttaatgatctgatctaggatcattgagatcctacacttcatcagttgtagtctcttaacaatgaacacatagaaatttctagatggaaaaaggttgctcacttaataccaagatcttcggcaa

SEQ ID NO: 864 - protein, 1170 aa, Mus musculus
RSALNGLWKYLNIKEDCNAMAFCAKMRSFKKTEVKQVVPEPGVEVTFYLLDREPLRLGSGEYTAEELCIRAAQECSISPLCHNLFALYDESTKLWYAPNRIITVDDKTSLRLHYRMRFYFTNWHGTNDNEQSVWRHSPKKQKNGYEKKRVPEATPLLDASSLEYLFAQGQYDLIKCLAPIRDPKTEQDGHDIENECLGMAVLAISHYAMMKKMQLPELPKDISYKRYIPETLNKSIRQRNLLTRMRINNVFKDFLKEFNNKTICDSSVSTHDLKVKYLATLETLTKHYGAEIFETSMLLISSENELSRCHSNDSGNVLYEVMVTGNLGIQWRQKPNVVPVEKEKNKLKRKKLEYNKHKKDDERNKLREEWNNFSYFPEITHIVIKESVVSINKQDNKNMELKLSSREEALSFVSLVDGYFRLTADAHHYLCTDVAPPLIVHNIQNGCHGPICTEYAINKLRQEGSEEGMYVLRWSCTDFDNILMTVTCFEKSEVLGGQKQFKNFQIEVQKGRYSLHGSMDHFPSLRDLMNHLKKQILRTDNISFVLKRCCQPKPREISNLLVATKKAQEWQPVYSMSQLSFDRILKKDIIQAFFEAASMMRQVSHKHIVYLYGVCVRDVENIMVEEFVEGGPLDLFMHRKSDALTTPWKFKVAKQLASALSYLEDKDLVHGNVCTKNLLLAREGIDSDIGPFIKLSDPGIPVSVLTRQECIERIPWIAPECVEDSKNLSVAADKWSFGTTLWEICYNGEIPLKDKTLIEVSTCFQTEVDKISDAHGPKERFYESRCRPVTPSCKELADLMTRCMNYDPNQRPFFRAIMRDINKLEEQNPDIVSEKQPTTEVDPTHFEKRFLKRIRDLGEATWTYSFQGHFGKVELCRYDPEGDNTGEQVAVKSLKPESGGNHIADLKKEIEILRNLYHENIVKYKGICMEDGGNGIKLIMEFLPSGSLKEYLPKNKNKINLKQQLKYAIQICKGMDYLGSRQYVHRDLAARNVLVESEHQVKIGDFGLTKAIETDKEYYTVKDDRDSPVFWYAPECLIQCKFYIASDVWSFGVTLHELLTYCDSDFSPMALFLKMIGPTHGQMTVTRLVNTLKEGKRLPCPPNCPDEVAVSPSWEGNCILNVFTACLIQHGRAAFCQADSSDLDAVTSTFKIVSAYSFLTIPWGKLPTVA

SEQ ID NO: 865 - DNA, 73102 bp, Homo sapiens
ggaatgaccaggcattgccactaaatagtttgatactttgaaatggatgccagtttggctaaattcaagtgttgtctgttagacaagggctattcgtaaaagaattgtgaatgtaagcatgctctggactgtgcttcaaggatgcaaaaaagtgtcattgagactgccttcctatgtgcagagtgggaaaaggagcatttatcttgagaaagaataactgcatctgatcaccgttttcaattcattgatagggaaatataattaaagattcctaacctatttcaggatacccatctaccatctaaatctccaagacttggatagcttccccgttcccgagtagttccccattgacaggcatgcactgaactcttcatttacgataaccgttgtttccatgaaatacactgaaaattttgcacagttgcaaggtacacagaatggattttgaattcttttggttgtacgaagcatccctagatgtgatcatgaagttagacacctgggactgtgagaaaataagtcatgtgtaagaagagtggtttggcagaattttaaaaatagaccttccatgctttgtgggtatagtttctacatattctagatctttgtggtaccattatatggctgtaggaggtaaccaactgaagagctttctgggaggagaagcttattgtgaaatgaagactgtgcatatgcgttgtatgggtctcagtccagctgtttgtattgaaacatcataggctatacattgtgagaaaagagaagtaatcttgtggtaaccaaagaagtttgaggtgaaatatgtctcactgtttcatattcagctggggaatgtctcactgttttatattcactttcttatatttgctgaaataaaaacaaaaataaggtaaatttgattagtagtaaccttgttgggtcctttaaaacagtgtttttcaaactgtagtctgttaatctttactgggctgtgaaatctgttttgtgggtcttgtttagcatttaaaaatgtattaaatataagaaaatgtagaatagaaggtagagggaatggcacatagtaaggatcaatatctttttgtgaaacttgtatgtcatatacacacatgtgtactacaaaatatattttttacggtggatcatggtcaaaaaagactgcaaagctgttttaagcatggctgtcagcataggttcctaggatatcagacaatgatgtgtaaccctagctggattcttggctgaatgctaggggaaactggggcagactggggaggagtgagaggtggcacagtggctccagaggcgctgtggtgacctgccgatcctgctctgccctgatgctgctgccgccttggtgaagactaagtgcattactcattatatggatagggttcgctgagagctctgccagcagtttaagattggagtctttgttggcagggcagtttcaaagctgaacataaaaactggttacagttttttggttgagggggccaagtgtaggggggccatgtagagaaagatttttcttgagatttcctggtttttttttgtttgttttttgagacgtagtcttgctctgacacctaggctagagtgcagcagcatgatctttgctctctgcaccctctgcctcccgggttcaagcgattctcctgcctcagcctcctgagtagctgggattacaggcacccaccaccacgcccggctaaccttttttgttttttgttttttgttttttttagtagagacggggtttcaccatattggccaggctggtttcgaactcctgacctcaagtgatccgcccaccttggcgtcccaaagtgctgggattacaggcgtgagccattgtgccccgcctcgttttgttttgttttctctcctaacttacattttgaggcaatagctgagtacctttggtgcatagactgaaatggacatttgccatttggggggttgtctagcattggaaccccctttgtttctagagtggtctcccattgttgctgtggaagctgaaggaggtgcagacacataactgagggcaaactaggttcaacctcttcgattcctcctcgtcaggactttgaatctggagggagtggtgcaaacatacagaggtggcttgagatcattcatggaagcagcagagttgggagtccagtcctggtgatggctggtgaccggtggaggctgtgcgagcagtggtgtccttatcaggctgttcctctgtccttctgtctttcccttaaactcattttacccttaggtaagcagagctggtttctgttgattgtacccaagaacactgagtggatataggaagcatgttagatttgtgtctgccctaaatgaacttagtatgtgacaggtgagaagaagtaggtgaatgcttggtagacacaaatagtaaaatttagcaaggggtggaaggattcagggttgttttcctttgtattcctttaaattatgggtaccttcaagctttgtcagatgacttatcagcaggagattctatgtctttacattgtgacattttggaaatacatgttaataaaaaatgagctatgttaggtgcagtacaaaatggtttcaaacttttataagttagggtttgttttatttgtttcttttttcagttttaagctttttaaaagccttgcgcatactcacagaaaactgatttcctaatgggtgtgagcattttattttagcattaagagatttagggaaatcttgaatcatcatcacaacaaccctgtaaagtagatacttctattattctgaggaaacaaactcaacagaggttaagaaactggcctaaggtctcagacagtgggtgttagagctgggatctggacccaggttagggtgactccaagagcaggcttttaactgcttctataaggaactttggagggcatccaatactttttcattatgcagggtttgagctcagagaggttaagaggcttgctcaacaccaggcaggtcctagtggatctgggctggaacatgggcctctttctgactggtgggaagaagctctcgcacaagctctgttcctcttgcaccctcccctcctttccttgctgtctgcctttttcctgcaagattcttcctgtctgcatactctttcctgcacaattgtgcttgtgattttccttcttcctggcctttatttttattttttttaaagaacagctgtacctttcctctctctttttcagtcttctccatttctgaaaactgagagcagattcctctctccttaatcccctctcagcccaaagcatggcccttgtgtcctctgtttttgactcccatggttctcagtgtctgtctctcagcatgccctcacagcctcttccctggggttcccgtgtatatgttagtcttgccagctgtcagtagattgtaagatttttggcatgctcagatgtatttgtgttacttctttggattcccctgaagtcccacaccttgcccaaggcagagtggtaaatggaaaggggagtgaggctacagctgagaaatgtgtttgagacctatctcacctctcactggccagttgactgtgggaacgccttagccgagtcttcccatctgaaggggctgtgaaactcgaatgtggtttagatgtgaaagccctttttaagccataaagtgctatataaatgcaaggttttattgtgatggcacaagtgcttcagaagtatttttgggataaatgattaaaaagcacatattgtgcctgggtgagttggttcatgcctgtaaccttaacaatttgggaggctgagatgggaggattgcttgagcccaggagtatgagaccaccttgggcaccatagtgagacccctttcccaaaaacaacaacaacaaaaattaactgaatgtggtagtgtgcacctgttatcccaccttcttgggaggctgaggcaggaggttcacttgaacccaggaggtcaaggctgcagtgagccatgattgtgccactatattccagcgtgggtgacagagcgagattccatccccctccatcccccccaaaaaagcacatactatgaagacaagccattctccccaccccgccatgttttgagtgtccatttgtgccaccaagtctttgaccctggggtaaggatatggatggcttcactaaatcttatattcattgctctttaataagattatggatgtgttagtggtaattagtttaaaagaagaaaaagttttttagaaaaggaaaagtaacaaagtctcttggtacaatgtggcttttagaaagacacttactgactttaagcaaagtactgtatttacttttatcaaaaactgtctctcactgaatgcaggctccttgggagcagtgcgaagcaccgaaccattgagctggcattgattatttaatcatccctagtttattgtaaatgaagcagcacttacggttctggggtattcctggaattgctgctatagttagaagtgagttattctgtgtggcaggagtggcatatagaaaagccatagttctgacttcctgacaggaaaaatagcagattttgtatttatatgatgtcgtccttttggctggaatccatcagctttacagtatcttgtgatgctttcatcagaactgttattccacgtctcagcatagcagtggggtcccagtagcaatagatacaagtcattttcggtggctctatgggtgtgaagccactggcagtttccctggcttgttgtgtaggttaggctgttaggaggcttcctgttcacatgttgctaggactttcctctcacactgtggcagtggtgccagggcagagcattagtagtgggcaggaacacagggaaggctggggccatgcagtgattttttaaatgacagtcctttcagtctacagaaggaagagtgttggagtaagatcagtctcctgggtggttgttagactatgaaaagtactaaaaaaccagagaagacagtggtgttgctgatggggacagtttagagcagttcttccccactgtggaacgagcagggtccttagaatcagtagtcacgtgtttgactcctggcactctcgctgattagcgtaaaacctctcatgctttttatgagaattaagtgcgagtgcctaactccaggctcaagatattgaaatgcttagtagatattgttttttttttccttgactggaactgtatatttcatcaagctgtaatcagtttaacaaattatggtcaaaatatgagtgcttactgcatgctaaactctgttgggcattttacatgcattgactgacttaactcttaatagcccagtgagataaatgctatttttatctccccacttacaccaagaacattgaaggttagggatattaactaacttgcctaagattacaatagctagtcggtggagacgccagaattcaaacccaggttgcaatgactccagcccgtgctcttaactgctttgctgtgtcatctgagctttatgaaatggggttttgatttgtatctaggcttttgctcagaatccctatttagactttgctcttcgaagcagattcatagcccactttagtcctgtgccataaagactattttatattgcgtcaatacctttttgtacacttacacatctatagcctcttgcaaaaagggcattgtaggtacttgatgaagagtttttgaaagttgtttgtttttaaaaagagacaacatcttgccatattgcccaggctggactcaaactcctggggcttaagcagttctcctgcctcaacttctcactgaaagatatttttaatccttgtaccaaccctctaggcaggatgtttcctcttaggttaatgggtagggaaactggcttagatgaaaatgacttgctcatggtcacacttgctagtatagagttagtgggaacctacacaccttggattactgtgctttttttcattgcataatgttgcttactttgtaccttcatctttcatttacagctgttaccgaacatacttcttgatcacctaatttgtgctgaggataaagcactaaatacaagacaaaaaaaaaaaatcctgatcttcctgtagttttcattgttgtgttaggtttccttaccaacgttaagactgctgcctgctgaaatagttgattaaggcttaagatttttagtcttaaaatttcttaagatattaagaagctgatttcagggcattttctaaattacatatttttctttcagtttttctgagttcataccttaattcataaacattttagttgtattttctacttcagaaatcaaaaggtttgattcctttaaggcaaacacaaagtaattcattgtaggtgtgatggtttcttttatatccatagtattttaattcttgtcattgagtttcactgtcaaccagtctgtttttaacggtaaaaatctggcagtggcccttggccaaagtggtctcattctgatgatcatatttatgaacattaaaatagtctatttttatttccttgtccactatccaaaatgtgtgttcttcccttgcgcagataccagtctttcaaaagatgcccttgaaaatttaagagagttccagttttttcagatagatttctggaattttgcatcttggaaaaatttctgacattttatctattgcagtgaggctttgttccaacccacagaattgtgtcttgtttcttttattttttcccttgttgagaaagtgtcagatatacttgtcttttttataagactgtggtaaactgaagcaatttgagtaacccacaaaatttccctgatttttttttcatgtaaaacagcacctacaaaattgagctacaaaagtaatcctctgtcaccaaaagaaaggtattttctttcaaatccttgacaattttataaataaattcgggtggaagaattcactgctatcaccaaaaaccttctgattactcttcctggtccttcctgttttctaagtgtctttatattcatttgagttgggaattgaacccagtgaatcatgttctttttaaagggtattttgtgattgctcctggtgaatctttctagcattgatgatttttccttttgtatattgcagcaagaaacttgaatttatttcttggaattatccaaagtgtttattaatataaactgatcttgctccttttctacttgctctaaaaataatcagctagatcacattgtctggtttattttagaagaaatattatttggatgaagccattacacaaatgctgtagcacacacacaaaaaaaccgcttgtcatcctgaatgaggacagttgtcatttcatataaagtggatcagcagccttaggtttaaagtgcttagaacagtgcctcccatgtcttctaagtgctatgtgggtgttttctatttttatcatcagaatggcaattccctgagagtagagattttgttgttattgaatcggcattcaaaagcatcacagttaatgcatattgtcttgaaattctgttgctgttcttgttttctcgaagagtttaatctctaggctaagcatcacaaatctataccattttactgttgtgttcaataatactggaggtcagtttgaagattaggtataatgtgattgcaatgtagtattgcttgcagaagagacagaatgattggaaaaccaaactccccttgattactggtttttgtagaattctagttctaaaagaatcttagtgattttagtcagatccttgaatcttacatgaggctaagagaagttccatgactcctaagttgaagtaacacatggtctgatagtgcatattaaaaaactttttaagttctggccaggtgtggtggctcacgcctgtaatcccagcactttgggaggctgaggcgggcggatcacgaggtcaagagatcgagaccatcctggccaacatggtgaaaccctgtctctactaaaaatacaaaaaatagctggacgtagtggcgcatgcctgtagtcccagctactcgggaggctgaggcatgagaatcacttgaatctgggaggcagaggttgcagtgagctgagatcatgccactgcactccagcctggcgacagagtgagacttaggctcaaacaaaacaaaacaaaacaacaacagaaaaacacctttgtaagttctaaaaaggtttatatggtagcccttctgaatggagcctgggcctggtggaacttacagttctcttcctgtcctaaaaggctgagttgtgaccctttccgggtttgaggcatgcttttcagtactcccctctggtcagttttcactgatccttggcagctggtaacggtatgctgtgaggaaacctggggtagacaggctccagacatgcagttagcaagcactgcctatggactggctagtgctgttgggtgcccaagtgtaaaaaggagtattgtgaggttttcctgttcaagcaacgggagagacaagcctagctcctttctgctataggacctttttccccacacatgctgatccttttgctgagactgctatctccgttttggcttcatgccccacctccatggacatccattgcatcttaactcaatgtcccttccctcctgagccccagaccagatcacattccctctattttatgttctctacttttccttcatagcattttagctctttgtaatgacctctttctgtacatcttagtttgattccattcttcccattgactgtaagctccacgtaggcagggaccgtattgcccttgtcctttgaattagcttagtttctgcagagctgtttgaaaatacttgttgaaagagtgaatctcttcaacaagtatagcatctgaagtcctgcttatgagcagaagcaaggcattagcatgtagctagtttctaagtgctgttctgaggcagggcagggtgtttattcacataattaaaacaattgattatattaatttttaaaaaacttttgtgcagtgattttaatcttgttaaaattggccataccaaaatagccaaatcaaagtcatcacaatcaaattcatacttgtctcccctgccgggctttccatcattacttttacttaagtcttacccactgcagaaagccttcccaagccagcccttgccagtgtcagtcaccagagctaacaacatcctgacgcactcacactattgattttaggttgcttttgtgtttccatttgtgctgtctccaaccttctattgtaaggccctgtggggatgctggcctcgtggcctcagaggtaacccatctccctctcccccttcgctgctgccctgtaatgcctgggactatgctcttcctaaaactggattctgataaaatgtgttgagtggccagacagaaaactgaggtgataatcactgttaatttgagaaccaattttgaatcaccaaggttggtagcttattatttgcaaaaataattggattctactgttaaagaatttgtgagaagcaacaaggaaagctgttaaaataatacaaagctctgtgtgtgtgtgtgtgtgtgtgtgtgtgtgtgtgtgtgtgtagacaaggttggggcggggtaattctagaaggaatgagaaattaaagtgcgcgtttttgggtgtcttaaactattgttcacacaatcaggagaggggctgttgatggaaaaagcacacaatcttcatttacattggacaggacactccatatcgggaagcaaaaatccctggcttcctttcttgatgcggtgaagttagtatcctctttgatgtttgcaccctaagatgtctctctgtcctctcgatgtcctaggccatttttttgttttgttttgtttttttccttcttcctctcaaatgctttttcttgcctgcttatggtttgggctgcttccttaatgaaaatgccctcttattttcagatgcaattacctctgccactgatttatttatttatttttgtctttagcgcttctctgaagtagctttggaaagtagagaagaaaatccagtttgcttcttggagaacactggacagctgaataaatgcaggtatgtagatttgcatatttttaaaaaaggaaaatatctggctttaaaaaaattgatgaaaccgtgttcttgaggctgtagggctattggtgctattgcctttaattttttgaaattgatgtatttattcattcccaatgttgagtatgctggttaaaaaaaacctcaaatacaaaagtataggaggtacagagtaaaagttaaacttcccttgtaatctctcctagatgttcaccactattaagaatttattgtacgttcttctagattttaatatgcatgtgcataatcatattatacatgttgtgcatatgcatgatcatactatccatattatgcttttttcattttgcagaatgtcctgtgcatctttctgtgttgattcatatgcagctttatgttatcctttttgacagccacatagtagtcctgcctgttttgtttagtgagtcctctcctactggacattgtcagttggatttttttcttatttcttttttttttttgagtcggactcttgctctgtcaccaggctggagtgcagtggtgtgatctcggctcgcggcaacctccgctttcccaggttcaagcaattctcctgtctcagcctcccgagtaggtgggattacaggcgcatgccaccacgcccagctaatttttctatttttagtggagacaggggtttcaccatgttggtcaggctggtctcaatctcgtgacctcgtgatccgcccgccttggcctcccaaagtgctgggattacaggcatgagccaccacacccagccgattttttcatatttcaaacaatgtgacatcctgtaaatatataattacatgcatttgcctgtttatttccttagagttagagggtgcaacactgtctttggattcttcccctgtcacgtctataaagactctcaaggacaaaggtttatcttacattatgaagcaggcttttagctactctgttttccatcacagtttttcaatgtgggatggggttaggggttcagtgctgggttttcaagtggtcttgcttgttgatctgaatttcaaggttaattatgaactaactgtttcaggctggtttccagaagattctggtcttcagatttatttggaaattaaacagttaaaattgaatacctctcagtttgtagcattgaggcatatctggttaatgtccctcttttcagaatctctcctcaccaggggagctaatagaccaagcaaatgaatttggtgaagagaactgtgactgctgtctgccctgtatgacttttcttgtttgggggagcctccttgggtcattctgcaagcacccattatgtgtaagcctctgtgcttcttacggatatagagaaaaatgactcagttcttatctcaaggaactcacagcatgtgcataagatgcttaaatttcctgtggctagtgcagtgggataagtttaggagcaagaagcgagggccttagggaatgggatggaggttcagagatggcttcctgcaggaggcgatatctgagctgaattctaaagaaagttgaagtttgccatgcaagggataaggtagaaagatattcctatagaggaatcagtgtgagtgaaggcaggagggtgagaagtagcattgggtaggggaggatacagtaacactgacagccttgtgggtttcaagcatgaagcaagaagctcagagtgatagaagataaggtgaggaaggctggccggccagatgatggagcagggctctgtttcagagtctcagaattgctctgtagattaatgggaagcccttggaggatctggtatgtgttatggagaaattactttaggggtttaagtgaaggttggcttggcagacaggaagaaagtagtaggagtgtggggtcagcgaattagtttgtagcccattggtattgggcaagaagaagaaagaatgtgtagggctttccctcatttctttcctcctttctggccttgcccaaggctaagttgctgaggttggttctttggccctaggtgctctccctttggagggtgcttatgtgaattacttacttacgcacttttcaccagggttttctaactgttccaaagtaaggcctcctcctgccctcctggtgctgcgtcaaagtcctgccgctcctcctggggtggtaggaaccaggctccattcattaattgttatggcccttccatgtgacttatgaacatgaattggtcatcattttgtgtgcagtgtctcaggtggggatgtgaagagagataagatacggttcatgccctcaccatgcttgctttttagtgggagatggacatgaaattaaaatgctgattcttgccataagtctgttcaaagcttatgtgattccagtagaaacagcagcagaatttgtaactaataatcagtcctttaacattgttggttccagaatgggctacatttttcaattacaacttgggtgcaaatggagaaaataaattcaggccatgtctaaaattattctgatttttgaaaatatggtctgaccatattttcaaaaatacataattaataaattacaattcattaattagtatgcataattattttccatggtttcatctcttatgagatctgacatgtttggtttccaggaagggaaggggcaggggagaggtacgtatccaataccaacaccaaatgtttctgcttttttaccttcagaacactcccttttgccataagaacttttagcacatagagtgaccacatagtcttgttttccttccacaacagtatctaaatataaaagaggactgcaatgccatggctttctgtgctaaaatgaggagctccaagaagactgaggtgaacctggaggcccctgagccaggggtggaagtgatcttctatctgtcggacagggagcccctccggctgggcagtggagagtacacagcagaggaactgtgcatcagggctgcacaggcatgccgtgagtactggcagctgcccagggctgggggtttcaccaacacactagttcagaagatctgggggtctctgccccttgtagcgctgctgggcagaaagagttgtggactctggagtcaggttcctccctgcctctgccactgccacttgcacgtgaccttaggccagtgattctaattctgagggtttcgcttttcactttcttcatctgcagagtggcttctttctgctccgtcactaatgaactataagataccaggggatgacgcttgacttctgtggatccaggctcagttctcatttccccacatctgtacaattggaataatatcagcactagatgaggtgctacgtaaaacacctgggactaagtccctgctcagcaagtagcgtatctcaatatcttaataattattcgaaacttctcctaaaaagtttgacccctccttctgctgccgtgactgccctcccatgcgtggtgctgagttgaagtgagaagctgagtgttgctttgtggcttagtcaagttcccaagttgtgaaaaggacgaggctctcaacaacacaagcttttttttctcctttcaagtgagagttgtcttaaagttagcctgttgccctcagaaggtgggaaaccaaagtccctttcatcctttgaacttgaggacattggcagtttttgcttgcctgattttaaatgacaagttaaatcatagaaattaagttaaatcacagatctaatccacttggattgtgatgatggttgtacaactgagtaaatacactagaatctgttgaattgtacacttaaaaattggtgaattttataatatgtaaattatatctcaaagctgttttaaaaaggttctatcaactcgttttatgatgatgaagtagccatttatgatgccgtacagcctgatccctactttacttatcccacctttaaccctcagaacaactctgaggggataggttggttattttaagaattgcttatcttgttagtagtacagcttgtttagaaaacctaccttctttctgatatttgtctttctgcctaaaatcttcacacaccagagtttcaggaaaaggggagaggcttatggtatggggaagagcgtagtaggctcttactgactaaacctgacacagaataaaatgggctgaggtgtatagattattagtgggaaaaatccagtaatattgtcaagttattttgactaggccgcaatgtgtacaaataaccatctttagacagcagctttaagtgtgtttgtaattatcagaacacctagatgtaaatcagtggttctaaagttttttttaaggctttgtttttttgttttctccctttccccttgagatttggtttatattgtttattctcttcgccaagcttcttgccatcagcacagcaggtataaacctcactcagtttgtaagcaaaggtcattgttgcagagtcattgggctgctgttaatgagggaccaaggagctgctgggaaagagatgagaggagagagcctgtgagtctgaggatggacacagtcgctggacctcctataactctgggcttagggtcagccagtttggggtgtcggtttctagcctaccttatagaaaatgagtggtgtctcttctgtaactggctcaacagaatattgcagaaactcatcaatttcagaaatacatactgaatgccacaggttcttgtagctctcactgttactacagaaagtgatgtttgagggcagtattgttttctttcctgtttttcacctctgtggggtaaagttttgtttagttctcattgattcaccccctcagtagctgtgtcttggtttgattctcagctctgcattttactagatgagtaaccttgaatcatactaaatctcaggagaccacagattcttcgtctgcaagatggtcaaaatagtatttacctcattagatattaggaggattaaagggtaatacttttttttaaatttaaaattttaatattttttagagatggggtcttgctctgtcccctagactggagtgcagtggttccatcatagctcactataactgtgacctcctgggctcaaaaggtcctccagtcttagcctcccaagtaactatgactacaggcatgtgccaccatgcctggctcatttttattatttatggaggtcttgatatgttgcccaggctggtgtcgaactcttgacctcaagtgatcctcctgctttagcctcctgaagttttgggattacaggtgtgagccaccaaactcagccaaaaaattatttatttatttatttatttgtttgtttgtttgtttgagacagagtctttctctgtcacctaggagtgcagtggcatgatcttggctcactactacctccacctcccaggttcaagcgattctcctgccttagcctcccgaatagctgggattacaggtgcacaccaccacgcctggctgtggggtttcaccatgttggccaggctggtcttgaactcctgacttcaagcgatctgcctgcctgggcctcccacagtgctgagaatattataggcctgagccactttgcccggccaagataataaatttagagtctgtttgcctgatgcctgacacttagccctcagtaaatgttagtattattgttttactactcagtacttttatataaagagatatgtctttgatctttctgtttatgggtagtaatactgttagaatcagacctgtgttagaattacagacagttccatgattaaaataagttacacttcagatatgtaagtgttggtgcacattcaaatgtggatatgcataaagaaaggctgggtttccagcccagtccacaaaagccactttatgaatgaaaatctatagcatatttgaattatttgtcctaataatactgaatccaaaagccatttgcctatgttcccaaggaaaacttccctttacagtttaactccatattctcggtttataagaaagactataacttctgaagggtaactgttcatattgcttgagaagcatggattgaggtgttcaggagagcactagatagctgccaaggtatctgtagcttcttaactcagtgtctgcgttggagagagtccccgcctgggtgtgctgggccagggagggggccctgtcagtgtcagtctcactgcagatgtccgatttgggaaacaagtgcctattacctcatattctcccaggttttttgtcatttaagtttacctcatcttagtttgaggcctggctgcttatgaaaatatcagtaatagctgattattggcagtcattctccccccaacctgcctatgtttcaggttcataaaattttaatcatgggcgtagaagtgagtgacttcataatctccctggtctttcccatcattctcttattgacggaggcaactggtggagtggagaggcaggggagcactgttgggccagctttgtgaagccatatatcttcttgctagttggttactaaataaaaaatatttgtgataatcatacagagtacttaagaagtatatttattattaatggtaatagattttaatcactgacaaaaatcactttggttattatttattctaatatgcattttgcatactactgccaggaatttgtttgcatgtctgatgtataatcacgagcgtgttagaattgtttaagtgctttctgtaggaaacagatggaagatttccccaactcccagagtgtttccgattagcaaagtgcacatcaggcaggatctgtgaacctctcagataggggtttttttgaagctggatttgataagactctgtgacggatacctgtaatgagaaatatcatcagagttttatttttaaatgatctaaatttggtttgccaggagctacagtgcatatttctggggagtcatagttcttgatgattatgatcaaaacagcctgaccgaacctggtcggaagtctgtttgccctaagaggatatgagtgacccagattctttgtggatgagagagttccttatctttgcatatattgggtttagaaacagatggccaaatgtatccgccttgattttctgatgtgtttttttacttttcctcaggtatctctcctctttgtcacaacctctttgccctgtatgacgagaacaccaagctctggtatgctccaaatcgcaccatcaccgttgatgacaagatgtccctccggctccactaccggatgaggtatgggaagtactgacctggtacctgcctggctccctctgcactgagggacagtggtcagcctggagccctgagtcacttaccaagaagtattgtagtcatttttgtaatttgtaacttttgtatttgcttgatgtgagaaaggacttcttcagtatttggaatacaattcaagatgagtttgatcaccttcctctgccacattttagaaaagaaatcttgataaggcagaggatattttgaatagaattagtgtcctacagcagagtttttcaaatgggtaatcatagttatgaatttaatttagtggattcacagttatgaattcaatttaatttagtgaatttaagaaaaagaaacaggagacgatactatcagcatatatacataacctaagtatattttttaaacttttgagatatatatatatatatatatatatatatatatatagatatatatacacactatatatataaaggtcatgatataaaatatttttcttactaaagttgcaactaaaaagctcgagaaacattgcctgaagtgttaactagaaattctaggttggccttgctctctgggagtggatgttttgactactccttgaggatttttggctgtggagctgtaatttttcttctgatgggcacctgccttttctcccatattgcagactttgagaaatgtcacaggtgacacagacagtcagtacttcaatagctgcagtctcctgagtttgtaaacatatttgttcagtaactagaatggaaaatatgttagttacatacttgctaagcagaagttaatgtgtgtttagcagtggagattataaatagggtggatcctttttgaaaagcaggttaacttacagaggtattaaaacagtagataagctcagatgctaatagaatgcagggatttgctagaaaagccctctgaaatctcggagacttcacagtatcatagctactatttttgggagaatttggtggagttgtcaccattacacaatgactgggatgtttttctcagtggacactgaaccagatctaactttctttgataatcatcctagggctgactttttcctcttctttctatgcttaaccaaagtctcacctggagaggaaagctgtgtgccgtggagatttcaggtcccagctgagccttctggctattggctttgtttttccacatgtaatcttgctttttgtggcctggggattggctgtgtgatcagcattgaaatgggttgttgcagtttgaagtctggaaggggtatgtccctgggttctaattctttccctctaggtttctgtactcagctcagagtctagaatggtagcttttaggattggaaaagaccaaagttacctaattcaactctttcatttttttttcagtggaaaaactaatacccagaaaagggaagagagttaacccaaaaattacatctagtgaattgtctgattagctttacaattgaggcattgtagagctctttgaggcattagtcttggttgtctgagtgcctggctattaaaggctgtctttgcctgttccctctttctgttagctgcctggaagtgcagggttgcttcacttttagcaccttgactctgtacctgacatggtgcttcaacaggatattgctttgttaccacaggccctttgaacttggaaaaaaaaaataccaccctaagctaaaacatttgcctgatgacaaactacaaagattttgaaacctcataatctcaccactaaaggaggcgtaaatgaaaataaatgttggtgatgatttcagtggagtaccagttttactttgggaaatattcttgtatttcaattatcgttttctgtttttagataatgcttttgatagttgttgggtaatcatagttatcctcaggtatctctcctctttgtcacaacctctttgccccgtatgatgagaacaccaagctcttatatatatatcttagcataagacaaccatattctgtattccttttcaaaaaatattttcttgcttttttaaacaattgaatttcacagtccattaaaacattttatagaagcctaaagagagtttgttgtgtataatatctgcatataaacttaaaatatgcagttatctgtacataattttctcaaaaacttgcagtgcgtagctctgattgatgtctatttgtcttttttttctttctcctttcttcctgctttgttcctccacgtcattttgaaaaggaatataggcaggtatcattctacatttattgatgtcatttttaattttttttccattggcatgctatagtatctggaatttttgtgtaccaggtttgatgagcacctttataattaattttaaaaaggtgtgtggaatgtctgtcttcagtgtgtcttcaagcttggtcttatgggtgatagggagggtactgattctggtagtcatggatttaaaattttgttaatatttttgacatcttattaaggagaaagctgccggccttattttaggctccctcatcttctgtttacctttagcctttgttccagtggagaagctacacattatgtttggtctcctcagcctgatgctgtctgagtatctgacctaaaggcttccaagacaaagatggtcccacagggctctcagcagcctggaagaatatcgttgttcagaccagattgaagattgtgttctgcccagagggagtttgttgggccctcatctctaccagatccaaggactgtttctcacagagactcagtaggatgtggaagaagaaggccgtggctccgttggctcagggaacatctgccttttcccctcctgccacctcccctggcagtggagggtgacctgtctctctccttggcacctcatcagagattcttctctcttggacaacaccctccatcctcggaacccttttctttccttatctcgggaaaccttccatattgtacctacttctcattctcttattactgccttcctccgccatcaaacagcatttacccctcctgttggccattctgtcagaacccctctttgaacctctgtagctggttcactccttccttcctgcttgtcccagggagaggatcgtggctaagttctcctgggcacgtgttctgttctacccttgaagagcagtgccaggcctgggtacagcatgagtggcagcctccctgccagctgatagccctagctttccactgtcaccagcggagggtaagggaacagtccagcagcttcagaggcctgacgtggctcatgctgcccgtggctctgcagatgtgtgattctttctgtgtgtgagagagacaccaaagcccacagtcaaattctcagtcactttcgtaaattacaaggaagatgggctgtatagaatcattgaagattataaaaatgttggtttttacctttaaagtaacttctttgtttatcctttccatgttaattgctactccctgagtttattcatcttttgtttatctatcaagcatgtgttcagtagctgttaggtaccaggcactgggattcagtggtgagcaggacagctgcagcctttgcttccgtgcacagctcacggcattgctcgaatgatgccacaggcatctgcttctctctgccgcttccgtttctatcttccatggggcttccctcccaggagagcgtgcctcatatgtgcctggctttcgttctttgctctgcctgctttgcatggtccaggctctgtagcctggcatttaattattctgttccagcttcccttccttggtgctttttcccctcctgccacctcccctggcaatggagggcgacctgtctcctcggcacctcgccagagactgtcatatgtccaaggacaacttatcctttaagcacagtgcctagagcacacacttgttaggggcccataaaatgtctaatttcacttaaaatcagaaaacatagttgagaaatataacttgtaatattttttatggaggaagggaaaagtgtttagggcctatggaagtcacagtgtagtcctgcttgtgatacgtgccccattgtgtgttgctggatagttgctgctggacctgaccggttgctcccagagacaggaactcacagagtacgagaaacatgcctgagagccctccacatctcaggccctaactcagggcctggcttgtcttaggctctgcaaacatagcacagtgacagttgttgaagtgtagcagcagctttttgcagggaaagagggagttgtatttattgcttctccatgacatggttcttttctcattagttcatgggcaagtcaagggaaagagacctaggtagcagctgagtctgtagcctacagatggcctgggctggcttggctcagtcacttcccttagtcacttccacacattccagaaattgtgtttttcttacaggtgacagaggaagttatatatggaaggtagggttaggggcaccaaccccctgtgcaattgacaatccatgcataactttgaccctccaaaacatagctaataataatagcccactgttgactggaagccttaccaataacataaacagactagtaacctgtatatatcttatgtattcatgatgtacctttttctgaaattaaaaaaaaaaaatttctgtgctacacagttcgtcagttttttcaaactgttgcaaatctccaaaaaaattttcaatatacttattgaaaaaaaaatctgtgtatgaatggacttctgtggttcaaacccatgctgttcaagggtcaactgtagtagttaagagaacaggcttttgtagttttaggtcacctagcctcttggaatctcagttttcctcatctgtaaaatgaatgaaaccttccttgtagagttgctgtgaagattaaataacataatatatataaagtgcttgttaactcgtttcatgatgcctgtagtggtgtttgggtagctctcttttaaaatcctattcatcatgtaagatacaccatcagttgaatagcagcaatctgggaagtaggaaacactgccacgtaagctgtatatcttgattgcgtgatgaaactaagttgcaggaatgttaaaatgtcaatcaaattggtcttggattcgaggtagaatgggcttagcagtgtggctgatggtaagcgtgcagggagctgtggtcagcatggagttccagtcagcaggtgtttccctattctggaagcatagtgagaagtcagaggagctgtctttgtgatcttcgggaagtcactttagctccctgagtcatagaggaggtgctgatgggacacttctcacgcagcgctagtaagaaggaaagagatggtgaggggctacaaggggcagggttgtctgcctgcttctcagggcacttcagcctccggcactgaccactgttggtgagccaggacgccctgcccacatctgggtcccctttgccacaattggcattcattttcctgccttccaggttctatttcaccaattggcatggaaccaacgacaatgagcagtcagtgtggcgtcattctccaaagaagcagaaaaatggctacgagaaaaaaaagattccagatgcaacccctctccttgatgccagctcactggagtatctgtttgctcaggtaggaagtttgggcccaggagaagctggagtttgtgggatgggagaggcattgtagagctcagaccccctgctgcagctgaacttggtggtgctagagtgctttaaggcctgttctgggtaagttcttgccacacctggacttgccccaagtgaggagaaaaaaggcagcatttcagctttccaagaggctggttatccagcttgtgggctttggggcttcctttctttcctattcctttccttttccccacctcctaccattttatttttcatccgtattaatagccttatgtgcagaggtcagagggaagctctgcttgttagaagatgtaattcaacagggctgaagaaggcacttctcagcagccgtagtaatgtctggggaggaaggagatggccactctgtcactggtggtaggatagaaagattagacgctagaaaaaaaacaaaagagaaggtagaatcacctgaaattacatttactctgagattgctaagatttttagtagtatgcttcctgattttaacatgcaaatttagatactgtatagattttgaaaatattttatggttcattttgttttgtaaactgcttttttattcatctgattttttttattgtttgtccttcaaatgtcaattaaaatattgatcttcgttgttttaatgactttgtaacaattcatttattcaacaaatattgactggatgtctgcgtactatttgcctcaggcacttgtacctgctaagatgctggagatgctggagtgaacaagacagacatggcctctgcatgcatcagatgtacatcaagttagaaaacaagcaaataaaatgatacatagataatacgtaagaaattatggaaagtactgtgaaagcagaagcttgcaatagagaatatggacaggggggtttgaatgggaagacctaatttaaatcatatgatcagagaaggtctctctaaggaggtaacatttataatgaatcctgaagaataaaaaggaatctgcaattctaagagaggggtgggggactatttcttccatgtagagtgtctcagcagcagcactactgaccttttggcccagatgattctttgctgtgatggcctgccctatgcattgtagggtatttaccagcatccctgcctccacccagtagatgccagtagcactctctccttagcagtgatgaccaaaaatgtcttcaatattgccgactctcctctcagcctcagttgaaaagatctgatgtagagggaacagaatgggggaaggccctgagggccagtagagctgcaaggagagaccatgtggctgcagaccagaggagggtgatggggaacgaggctggagaggcaggtgggggcagattgcatacacagagccttgtaggagctggcaaggggttatgctttaaccctgagtgtggtgggaagccatttggaaggcttcattttatgtatgtttcaagtcgatgattcttgttacacgtggaaagcagattgtgctgggtccaagagtacactcgaaacatacaagctgagagtctgcagcaatgatcctgggagagaaaatgctggtttggcctagtgtagcaacagtggcagtggagcaaaatgagtagatctgctgttcatcttgaagatagaattgataggatttgctgttgagttggatgtggaagctgagagaatttgaggaatcaaagatgatgactgggtttctgttttgggtgatgtcggatggataatggagtcattccccacacagggaaggtcttgggggaagagggtggggaaggggcagaaatcaggagtcctttttcggagatgcctgtgaaacatacaagtggagatttcaagtaggaaattgagtaatgaggctggagtccagaggaaaagccgtcatttatttaacttagtcacccgttcctggacattttctgtttttctcgttttcccttttatgctattactttatagtctgttgtgaacaactgcatacgtaggtggtcctgtacacgttctgtttattattaccttagagtataccattatgtgtgagatcacacacgtatcagtatatctgtgtcagagttatgtcccactgtagggctttagttactaattgtccattatctccattccatctatgccttagaactgccatagagacaacagagaaaggggacagtgcacagccccaggcagatactgtgtggaaaaaaagaaaatgaactggccatttttagatggtctttttggattcagcttcccagttttgtgtatccatagctgagatttattctttacctttcccgggagcagaggtgtaaaggaagagtgtgccatacttgaagaataagcatggcgttagattgaccttttggaggctcaggaataagtgacttgaggtagctgtacagtgaatgtttacaaaaaaaccacaggccaacaggacagtttcaggttttcctttgctcttcacacattactggcatagatcattgttcctcagaagtttttggaatgtcagtgacctttcctcacctgagagaaacaagatatcccatggtgaaaagaagagaaacgggagcagtgggagccctccatccaaaaaccattaatctgaagttcttcagggaaagagagcatctcacatatgcaggaacacttctcccaggctttgtgcctgccctgctccaagctggagaaaggcttaagagttcacactttagtgttctatgtactttaagtcatttgatgaaaaccgaatgtggctgtagcacggcattgaacagtggtcctggccaggtctagatttaatcccagcctaccacttgctaagccctgggcccccagggtactcaattcttctacttgacttggggttttataactgcctgacgttagatactcctagtcatttattcttttctttctccttagagtggaatctccaggagatcaggaacgtggtttagtttattgctgtttccctagcacctagaataacatctagcccataattagttctcaataattaccaaatgaaggagtgactgaataggggctgtttactgttttgtgccttagattcctcatctgttggagatgacgatgttaacatccacgttgtaaggtgttatgaggactaaataaaggagccaagcactgtgtggcagcactgaggcagggtttaatcagtgggagccggcactggaattatcgttttcactctgtacaaagctgggctgggcactgctggttagccttgttttagtttttgtgtttaaagttcccgttagttcttagaatgctgtgcacctccatcagtgggggggtatattttggtgacacatttcactatgggaaactcgaacggtagatgtgggaaaatgtacatgtggtgatgatgcactgcggaacgttcccctttccctagagctacaccagaatggagggagagccccatcaactctgtacacccagctcctagacaaggccatctaagcatgtttgtggaattcatgcatgatcagacctcagcccagtgtcaccttcccttgctctggcgcagtccaggcctagtacacagtgtttgtcagcgtcacttctatggcgaagggacttcgtatgtctgtactgttccccagtgcctggcatagtgctcagtcaatgttttgttaaatgaatgagcgggggagaacatctcctgagccccttcacacccaactctgtttaaaagagctctgatgctagagaaactgccaatctgattcgtctcgttgctgtgctgcgtttctaggcggcccctccctgtgtagtagccttcttgtcaagatcaaaaacgggtgggctctcatggtttctcccccttgctcctagggacagtatgatttggtgaaatgcctggctcctattcgagaccccaagaccgagcaggatggacatgatattgagaacgagtgtctagggatggctgtcctggccatctcacactatgccatgatgaagaagatgcagttgccagaactgcccaaggacatcaggtaaagcttcccactggctgaagaattgattgtgaggatggtggtgtttctacatgttcttacacatttcagcttaattactgccagggtttggctgacctttgctctctatgaaacccagatcttccttagaatgtttactacatacacgtagcctaattataattgtgtcttgattttggatgttggctgctaatctcagaaatttgtgcttgggtgaaatttctgagctgaggatgccaataaaattagtggcccccaggccttctccgtcccctccttgcccatggtggacactgtcgtctatcactgcattttttccttttgttttggacccatcttaaaaatccttctcagtacagttctgtaagcagctactaccatcccaagcctgaactctgaacacgttacagtagttcactacagagctgttaattctaatgtgagaattgatcaactactattaaatatctcaagaaaattgcatttacttaaaaatatcgtttgagatcaagtctctgtgaaggaatatttaagttctgtccatctatgacatccaatagttttttttcaccagtgggctattaggatggtcataaatgaagacagtctcattttgaagaagggatttcgtagctgcattgtttgtgataggcggcgtgcgtcttctcattaggttgctgcttgtttctccttgcgcttgaccagagtctagagcagatcacagcttgctcctcagtgatgcagggattgagtcgatactgctcaactgctgctttctcttttttctgtggccttcactttgggtacttcctctttattttttcataagctaaattgaaaaatgacagttcttctctaattctgttatattacattaatctaaaagaaaaataacatttgttgaggatgaatcccaaacttcacaattttctactgttctgaagccactccatgcggcagggatgacccggggccaggtgctgtctcagtcctgggagtaacaagcagatcagtctccgcatttggcccccagtggacttgttctttgtttcaggggtactcaacgttcttcttaacattgactcccgttctagcagtatatcagcttgtttagattctgtttgttgtagatagtcgcccactagcacctggataggtaactaatctttcagcttacctgttgatcttttaaataatatatctgattcatattcacatggcaaacactaagtcttttgtattaattagctttagtatgtctttctctctctctctctcactctctctctctctctcttttttgtgggggtgcttggggggacggagttttgctgttgttgcccaggctgaagtacaatggcatgatcttggctcaccgcaactttggcctcccaggttcaagcgattctcctgcctcagcctcctgagtagctgggattacaggcatgtgccaccatacctggctacttttatatttttagtacagatggggtttctccatgttggtcaagctggtctctcactcccgacctcagatgatccgcccgcctcggcctcccaaagtgctgggattacaggcgtgagccaccgcccccagcctttctttctcatttttaaaataaaaaatgtgatctgtttagaaaagttataaatcagacatgcaaatagaacatacaaagcatttctcatcacacaaaatgacaattgctcctaacaccttgcagaccattttctaactgatgctcaatcctagtaacagtgtgtagatgtgagtactaatgtgcacaagaatggtgaagctagcaagcaaaaatgtagatgccctgccttggtgacccagaaaattgggcaatacttgtagcaattcccatttcagtgaaatctgtggagcatgtgctttgcttttctttcccagtttctattcacctgcatctccttatgatggtcatcttcagtgctaactccatctaacgtcctctgggaatagatctccctttcccatttggcaacatgtggattcatggacttagatttgtttctaaactattttctcctaacctgtacatgaaaaggagatgtacttttctactgtcttttagctacaagcgatatattccagaaacattgaataagtccatcagacagaggaaccttctcaccaggatgcggataaataatgttttcaaggatttcctaaaggaatttaacaacaagaccatttgtgacagcagcgtgtccacgcatgacctgaaggtgaaatacttggctaccttggaaactttgacaaaacattacggtgctgaaatatttgagacttccatgttactgatttcatcagaaaatgagatgaattggtttcattcgaatgacggtggaaacgttctctactacgaagtgatggtgactgggaatcttggaatccagtggaggcataaaccaaatgtaagtggctgttggcagtcgatcaaagagaacattcccgtgtcacatagcgtatgctgtttatccttctggagtcatctgtctgcatgtccatcactcccataggctgagtttatttaggagaccatgtatcattcatattttatttcatccctgtagcacaaggtctaaataagtatttattgagttatgtagagaaatataacaacatgtataatacgtagtagtataataataatagcagatagttcctgagtgtttaccatgtgccaagtacttttctaagtattttataagtattaactcatttatttctaaaaataaaaaaacctttgagggaagtattgctattatctccattttacggatgaatacaaagaggcacagagaagttaagaaatttgcccaaggtcataactaataagcatttgtgccaagaattgaacttaggcctctggctccgtgaaattgactaattgattttgctttatgggagcttctttatgagatatttattggatgaagaaatagagcagagtggcttaagagcatgggttttagacccacgtcgacggggttcagatcctagcttcatgacttatatggccttaggagagttatttcacctttatcagcagctaaaaattactcatctgttaaatggaggtacctactgtctaactcataaggttgtgaagaaactaaacggcatttagcacaaagcctggcaatacaataaatgttgaataaattattatagccgttacaattattattactgtaattaataatattaaagtaaatgtgggtgggtgcagtggctcacacctgtaaccccagcactttgggaggctgaggcaggcagatcacttgagccgaggagtttgagcctagcctgggcaacatggtgaaaccctatctttacaaaatataccaaaattagcaggatgtggtggcacgtgcctgtggtcctagctacttgggaggctgagttgggaggatcgcctgagcctgggaggtcaaggctacagtgagccatgaccttgccactgtgctccagcctgggtgacagcaagacactgtctcaaaaaattaaataaatgaataaaatatgagactcattttctcctcctgttttattctcatgctaaaacaataatgcttgatacttactgagggttttctgtataataggtattatactatgttagttagcacttgtctaatctcagagaaccctgtgaagatgtaagctatttcatgaataaggaaaatgaggctcaaagagatgatgtaactagttaagtaattggcagaggcaggaacttaacctagatctctggtctccagggctcatgcgacacaaaatattttcacttgtgcagatatatattattcagtgtgtagattatttcaagcatgaaattcgtgtcttctctggaaaatcccgacttgagtactgttacaaagtcaagacgattggtgataggagaaagctcatgttcagctcagtggtaactgggaagagtatgttatctgtttgtgtcagagcatgtgtagtagtctggaagtgaggagacctgaatgtagatgcatgtctagtgagcagtgatttccctttctgagtttccgtgcacattgcgtattatatagtttagacagtgtgctcattaaggtctcttccagatatgaaagcccaggattccctgatacaacccagttctttggtcctaaccctgcaggtgccaactcccccaatcctgcaagtccagaagagctggctttctcttccttggacctaggccctgcataggtttcccagcagcactgaccttttaccaatagaaaatgaagaaagcaacttaaccctgtcccttttatgtatcttatcaggttgtttctgttgaaaaggaaaaaaataaactgaagcggaaaaaactggaaaataaacacaagaaggatgaggagaaaaacaagatccgggaagagtggaacaatttttcttacttccctgaaatcactcacattgtaataaaggagtctgtggtcagcattaacaagcaggacaacaagaaaatggtaagtttgtcccagaagctcttaagtctggatctggtgatgagagggagaattgctgagttccgttctgcagcacatgattttcagagttcctgtcctaaagagaaaacaggattttcttattgaagccaaaaagttcctattaccaaggcattctcagtgttttaaagttacaccgatacattccagtgcctttctttggtctcagaaatgtgaatctgccttaggatttgcttccctcccaaatacacctcagcatcaatatttaattcacaaagctagtggatttgaaggaaaagaaaaccagcgaatgtcagtgtttcctcccaagggttctggcacggcctctctgctgagctgaagtgcaaagcaggaagccccacgttgccctcaggcgagcctcggccacagtggcagtcatcgatatggtgtcaggcacaccccagtgactctcggacagaggaaagggtgtttaatctcacttcctcttttttggtatcacttgaggacataatctaaacaagcaggaagtgggaactctgccaaaataaacctgtttgtgtcaggggaagtcacagccaacaacatgcagagagagcggctggtgagacagctagcactcttaaggtgagtggagccaacaccaggaaaggccacattctgccaaaatgtggcagatactgtgtcacaatgataacgctcagtgctgaggaagagcctggtgatacggtttagggcagacagtcactctcttgtattcagaataacttgtctttctgatataaccttttggaaaacagtttggtaacctgttaaaagccttgaaaatatttatatatccctctgttcaggaatctagagaatgaatctatcttccagaaacaatgtgagaggcaggttatggtttatgaataagaatattcattccagtagtaattaaagtgtcaaaattctgaaaataacttaaatatacaataataggagaataggaaaataaatcacaatttgcctgagaagcagaatattagaaaatcaggttgctgaattttttaatgacctggaaaaaaggtcaggggaaaaagcaggatataaaactttacctatagaatgggaccagttttgttcaaaatatcaataggtatgcatgtatatacacatgctcttagaaaaataaatattaacagctacttatttatggtggcattatgagtggttttaattttcttattctcccctccttttttttaaacaaaaaacttacattaattttattagaaaaatatagtaaaaacaaagtgaagggggagaagtagaagagctcagatggatgttaatggaaagatgcgaaatggagggagaaaagaagaaatgctgttgatggagcacatcctggatatcaggccccgtgttatatgctgcatcctggatattaggccccgtgtcatatgctgcatcctggatattaggccccgtgttatatgctgcatcctggatattaggccccgtgtcatatgctgcatcctggattttaggccccgtgtcatatgctgcatcctggatattaggccccctgtcatatgctgcatcctggatattaggccccgtgtcatatgctgcatcctggatattaggccccgtgttatatgctgcatcctgggtattaggccccgtgttatatgctgcatcgtgggtattaggccctgtgttatatgctgcatcctgggtattaggccccctgttatatgctgcatcctggatattaggccccgtgtcacatgctgcatcctggatattaggccccgtgttatatgctgtgcctgtatcttggtctgtcttagtccttgtaagaaccttaggggactgagcatcagctctacttgaaatgaggaatctgagactaatcaagaggcatgggatcttgcacagggtcactcagtgagaaagtggcaggcacttgcccagctctgtctggttcctgcctgtgcattttgcctgtgttgctttggcttctaaggcgttatcatcccccagagaccccgaagggagtgagggagaggctgacatgtccatgatctggctcttcaacgtggtgtatgcctggtgcacattttatgagcctgccccatcctgtcctgtcctggttgacacagtcaagtctagcaccaacacaagttggtgcacccatcatctaagtcagagctcaccctggccacatgggccaatgactctatgccaagccacagtgctgtggagggagcaggaggagggcaggaagaaagaaatacttgattcctccattagtttgtttttctttaccacgctagcccttactgtgtgtcaggtacttcctattctgagcacttcacaaataccacctattttaattttcatgtcaaccctatgggtgagtatgataaggggaaactgaggcacgaagaggttaagtaacctgtccaaggtcacagagctgttaggttaaagcatttgaaattgccaatatttgaccattttgacctataaaaatgatgattccatatgcataaccctactagcaggtggagaggctgcgatttgaacccagagcagctggctctagagcctgagctgagggttgaccactgctccatgctgccagtttagaatctcatgccctcgttgtcccctcccagccatgggattcccaagccctttaatcaggcagtgctttgaagaaaccctgataccagcatgttgtcaagtcagaccttcatgtatcacttctctctacatctccttggcatccctcatttctgtttagactcctgttctcaggaaatgtaagtgcagatgtggtcttacttatcatgtggctgggtgaggggctgcccaggccagcctgccccttgttcagagcatcttgaatttgctcttcagggatatccgcaggtgggtgcctggtcacacccgcaaggcagtgtgctcagtgtggtttcttttttctgaagtgccattcctatggtgaccctgccctctccaggcctccttcctcatagccccaggcatgcttccttcggcattacagctgcactaggcccctgacctccctcctgccgagtggcttgtctcccctgctcctttttcccttcactgtcctctcatttctgccacctgcctctcctttctacagggctatgaaagagtcattttgcccttttttgaagcctcagatgctttttaatgtttttttgtgagtcaaagctccaaatcatggcttttgcataccttcccttgccaggaaatgttcttgattgacctgatagttcctgtcaaatgggcagtctcttcagggatcaatgatcaggacaaaagtaccccaaatctacaacacaggtgtctttcagaacaccttccttgatggaaatcccctccctcctcttctccacaggtgcctttgcctcttcccactctgagtaagacactctgctctctccaactctcagagctccctaggcttaatctagcaaactcttcactgggcctgggattattcctagattaaaatccgggagtttcaccttctagagcaagtctgctatgagatgaaccacactgcctctgtttcttttctcctaagcaggaataatgccgatttagccattcaccgttgagtgccaagatcacggtgcatgctttgccccttcccacctccacttttgtgcctctgccaccttgattcaggcttcctcttctcccatctggacccaggggacagcttctctgcatgtctccctgcctgccacagcctcccccaccgcgtcacccccaacacacacacacatacacacacacacacacacacacacacacacacacacacggacccaggggacagcttctctgcatgtctccctgcctgccacagcctcccccaccgcgtcacccccaacacacacacacacacacacacacacacacacacacagagtcatctgatagtttgagataatagatgggaaaatgtgttgaacagtgaaagtcctatataaatgcaagggggatcgggcacagtggctcacggctgtaatcccagcactttgggaggccaaggtgggagatcactcgaggtcaggagttcaagaccagcctggccaacatggtgaaaccccgtatctactaaaaatacaaaaattagccaggtgtgatggcaggtgcctgtaatcccagctacttgggaggctgaggcagaagaatcgcttggacccaggaggcggaggttgcagtgagccgagatctcaccactgcactccagcctgggcgacagagtgaaactccatctcaaataaataaataaataaataaataaataaataaataaataaataaataaatgcatgcaaggggtatatttagtattgatgaaaaggttttccctttggggttcccattgggttataaaaatcttctcactgtgcacctccctacagagtcagccacttaagctgatagagacatgatgtaaccatgggaatttcttctctctcaacaggaactgaagctctcttcccacgaggaggccttgtcctttgtgtccctggtagatggctacttccggctcacagcagatgcccatcattacctctgcaccgacgtggcccccccgttgatcgtccacaacatacagaatggctgtcatggtccaatctggttggtcctagaaccttatcagttgcctttggtgtgcagagagcccgtgttttagtgatggggcatgtcatcattgtttaggtcaggccagttgaccatgctgcctggtacttgttggctgtcctcctttcctccctgctgtccaagctctggtcaggccttcctgtaatctcctaccatcctctttgcagcagcccctcaatgctgcttctttacttggatctctcttcatagtttaaccccctcacctctccatagctgatcaagaagtactacactttctgatttcttgctgtgtcaaacaatgtgggcaattcaagaaacactgaacacagctgagcgtgctgccatgtgcctgtagtttcagctccttgagaggctgaggtgggaggatcacttgagcccaggagttcaattctagcctgggcaacatagcaatatcccatctctaaaatatataaaagaagaaaaagaaagatcagatgatgatctcagcatcagacagtgtaataaatggaattgtcagtcagcttgtcccaaggtgccaggtgaacagtggggaccgtgagggtaatacagccttaaggccagaaggggctgtgtgggatgccttgtcccacctgcatctcagaactggcagcctgtgctgaagtacctctggtgatgggcaatgtgtgaggcagcccatggattggagctctgactgtgagagatgtgcatacctttctgatatggagctgtagttggcttctctgtaacttctgcctactcacttgaattctgccttttgagacaacagggattcttttgactttctcttacatatgacagcccttcaggcaaaggaaaacagccagctgctgtgtttcttctgagcctctcttttcagaccacagaatatctggggaagcatctcttctgccacctttcacatgatgtgcttctcaccttcttccctcttccggctgccttgtggacaggtagcttagtagtcacatggccctggccttgagaggctcacagactcatagggaaacagacacacaaagaatggcagagcaaggggttgagcatttgaaaagcgtcttctgccaatgtcccagccatggttgtgcttcagggcccaggcactcgctcttcccttggcccagaatgcccttcctccagaatctgcacagcctccacttccttcaggtgctagtcagatatcaccttatccgtgaagtcttccttgaccaccttatatacaatcatacctctttcccttctccatcccatacatgttggccactgcactctaccttattttccttcagtggcagttgttacctcctgagatactatgtttatttacataacataacatttgttcctggtctgactaccctcacctcccagaatatgagcttcccaaaggctggggctgcattgctcactgctttcttagcacacacagggtctgacacattgtaggccctcagtgagtatttgttgaatgaatggatatttcatgtttgatgggatgctgacattccttgcctaaagagcctgctcagagtaggtggcattcaaatctgattaaaccaaagaatcaatgatggcttgccaggccttaaagcacggaaagggtacctagatgagaggtcagcacatgcaaaggcatggcgcagttagaaagtacacaatgtccctgtctctctaaaacacacgaaccatggcggccctctctcaccagcacttagcaagcagcactcacctcatgcagggatgtattcagtcagtattcactgctctctacatgccaggactcactggtcctggggatacaaagaaatgtaagacaggcctgttcctactaacatctgtccagtcctcactgatgtattctctcagtgtgagcccatggtgatacaacaataaacaacatggcctccagttcccacccccatgaggtttgtgcttccactgggctggctaggggtggaggggaggcgtggcagatgctcatcaccagcctccagagaggctcttctgtcttgagctggagatgatgtctgtagggaatgcggggacaagcagggctcattgccttgggcaggagtctgagtcctcttctcaaccttggagactccatcggtcctgaggccactcggtatttccgctacgctcatggatggcatcagaggggactttaggatcccaggcagggcagatagtgtgatggggctgttaagacttgaggcagctcaggagagtggatagcccagaggttcaaagtcctgtttggtgtgagctctttctccctttgcctacttctccctctagtacagaatacgccatcaataaattgcggcaagaaggaagcgaggaggggatgtacgtgctgaggtggagctgcaccgactttgacaacatcctcatgaccgtcacctgctttgagaagtctgaggtcagtcaggacactggcttggaccaggccatacagccatgaggtgtccagtgtagcctggttcaggagctgctgcagacagaaccacccttggcagggtggaactgaaaagcctgggtctctgagaagatccctgggaggtcaggcaagggcccctgctctcaaaaggagactgctccccagtagccagacccctgcatcctccccctgtagggcccttcttccttcatgggacccatggtgggggtccaccatggctctggaagacagaacatgaccagaaaaccaattcacacccaacacttggaaagtatagtgtcattatttagagtggtttatttagactcagtgccaccatcatctcagacccagagctatgcctgtctacagcattcactggtacaaaccagcgcccaaatgccacttcatccacatggcctaacacagttttttccaaatggtagcttcagacactttaacaaattgccaccccatcttagaacaatgaatagagatgtcttttagtgattgaagcgtagctgaagctggggatgatgtgagatacattctgagggctaagatattcaccagaattactgactttgcctcactagaccacaaatgcctttgttattcatgtaattaaaaaaactacaaagtggaatattttcaaagacagtgagttttacaaaacactttacatcagtacactttaatcagtactggttaggctccacatgcatggggagacctgggacacggaggggcctttggcacggagggtagacgcaggaaggacaagcttattggcgaacccctggggctggactcagtcaagagtgggaggaggaaacggcagaaggaaccagcgctgccaagtgtcctgggtgatgcaatgcaggaacaccaccacctgcccaggctcttgctgaacagctgggcctcggggctccgtggctcagagcctgtcaggttcattgccttcccagaatgcttgccgtctattcatcagtcattggaggaagtttaatgtgtttacgatggaggggtgcatgagacagcccagcctcctcctgaagtggaattggcctgtgcagtaccaagagtgtccgtgactccctaacaatgtcacatcacccggggaaaacagcagtcatagaaatgattacttccaccgcacactgtggcccaccagaccctgtgccaagcgttgtacctacttgtgcttttttaagccttgtaatagccatattaggtaggtgatattatcccattgtacagatgaagtaactgagattttgaatatcatctcctagtttacagcttatgtaagtctttctggccctcattgtttaccactaaaatagtttagtttgtacaaaaagagcccatgagggaaaactgcttatacctcctatctggcaccacagtgtcccaaacctgggtcagacactgaacaccagctcccagtgtggttttcctcaagtggagacatggcctggaagggctcagtttgaggctgttccttgagaagttgtgccatcataattattacctcatatataatatctgctggactttataaagggcttactaagtttttcaatacaccatgttagataattgtagcaacaatcctatgaggttggattttcatgaactttatcttacaggtgaaaaaccaagtgacgcttttgtagaaatagctactgtgtctgctgtagtattaactcccttttatcaatgccttctcctggaccttgttttattatttagttagttgttggttggattatttattgataataaactttatttttgaataattttagatttacagaaatgttacagagatggtgcaaaattactcttcatgcagcttcccctaatgttaatatcttacatacccatgcctgaccccattttaaacatgtaatttctggtcatttcccgaatagcaggtgcagggtgcccagaagcagttcaagaactttcagatcgaggtgcagaagggccgctacagtctgcacggttcggaccgcagcttccccagcttgggagacctcatgagccacctcaagaagcagatcctgcgcacggataacatcagcttcatgctaaaacgctgctgccagcccaagccccgaggttcgtctccctgtgccagagccaggctgtatcccatcagtaatgtgctgagacccagatcgaccaaaacacgctgactgacttaaacaaagtggaccctccccacagtttctaggtgttttttattgagtttaattacacttctgtgcccaactcacatccaatcccttgagtgtgagcattttctgtagaagaggcatatacctttctcagcatctcattaggctgcagaaagaggcatgctcagcattagtaagcagaaaatcacttctttcttccttaagataaaatgccttgaggagtctcctgtcactggtttatttatctgagagatattcctggcacatcttttgtgggccaagaactatatcagatgcaaagaatcagaaatgcataaggtccagtccctgctctctgggggtttcccagcctaatgctgatgttacaggtaaatgaggccactgcagtttgtgatgggtgttttaactaacatagatatcataccctggagtcaaacagaaagggatggtcaaaatccctgagttccgtggcacagggggctgcctggaggaggcagctcttgaactgagtgtgggaggatgagtgggaggttgccagtgcggtcagggcatctcggcacgtgcaaacagaggcatgggcgggggctgccatgaaggtgaaggtggaaggaaggtgaaggtggaagggaggggcaggtgaggctgagcttagggtgtgggggccttgagtgctatgccatggagctgggtctttatcctgcaggctgtaggggccagggaggatcagggagtgaaatggatccaagggggagccactcagctgtttcttgttaagcctcttgaatggcgtcactgatgttctgcaggtggatttgtctcttagaatgtgaggactggaaagacacgtagaggtcacacagtcaactgtctcattttatagatgagaaaattgaggcccagaagagcgaagtgggtctcatcaaaggtcagcgtcaaagaggggcttgagtgccaggcctaacctgagtgccctagctcttgagaacggtttattttgctgctcctcacctcaagatgctgcccttcatgcgtcaggttcttcccttagaaggaggaaggcctcaaagaaggagcagcacgattgccactgaggccccatgagtgtcagaggaagaccctctgaggagtctttatctgggacacatcttgttcttccaagcgaacgtgtccataaaccctcacaccaccaggagtgggcagaggaagcagcaccaggatagaaagggacctgggttcttgatgtttgaatcagtttttggtctcagcaaggggcttgtcactgaacttggtgaaagaggagggacttgtgttcttgatcagataggggttcctgccaggctcagagaataactgcagcctttgttttcatgcttgaggattttccgcaaaggtaaaaacacatctgccacttggctgtgagacctcagagtaagttcaaaccttaaagcccaacagccctatttattcacagcaacacactggaacgaaccccagttgaggctcctgaaactcagtgctgaatgtgtttcctgttgcctttcccacctgactgtgaactcttaagacaggacctgagtctcactcaccactctatgggctcgtggggaggacagtgcccagcacggagtcagcgtgaataatgcctgtcaagtgaaccaggtagcaggagctgctggatggtgggtgcctactgtggcccagtcagtttatgtacctacctcatttatttcatctacacagtagctttttgtagatattacaaaggtgatgaaattgagacttgagatggtaagtgacttgctcaaggccatgtagctagtagtatcggtagtaggtagaacagtagtaataattaataagaacggctgctatcatgtgagcagggcttacagtttgccaggcgttgtttggagatctttcatgttttaagtcatttagtcctcaaaataacccagaatatgttgttatcccaattatacatgcccaagatcacttaggtagaggatgagtggggatttgaactcacgttgtctgactccaagtccagtgattccttctgtaccactgcccccaccctgcccaggtcacactgtctttggaaaggtgcagccatcagcctaggactttagagcaggcaccaattctcctgaccttgggagagtaagaataaggcctgtgtgtgaggcctccttacataggtcccccaaagctctctctcttccctttgccatgtgcaaattagagaagtggggaaatcgtgaaaattagacatgagaatattgtgttgggttcttcagctcctctgctctcctaaccacggggttttgatagccagaccctgatctgggtttctcacttgaaaatgcaactaagaaactcttcatgggataaataaaaagcaaagtgaaaaagcaggaggccattcagagtgggcgtgacggctcagcaggtcccacatctctagtcctgtgtcctgtgtccagctccactacccatctcccactccagaaccctgatgatacaggaaggatgatgacagtgactaagatgtaatgccagtcataatcacggcggcaaccagtcagggagcgttttactacataccgggcactgaaggcagccgttcccttgcgtcatcccattcttccacacggtaacctatgaaggacacaactgtggcccccatttttctagtgaggaaacaccttcatggaggcactgtggcttcccccattcacattgttaaccctggtgccatgttccctgaagtgcccatgcaaagaatagtccataaatggcttcggttccatccgcctctcatttcccaagtggctctgctgcctggcctcttgcctgtggacaccagccacggggccccttcttgatgccttttctcctgagttgagttgagcctgagttgcctctgaatcggattttccccaggtaacagagtggagtcaggaaaatggtatggagggagcagcctctggaaaaagagtgcccaggttgtgagaacaaggggagcctctccctgagccctgtttctggcacccacatttgttctcccgattagggccaggtatgttgtgggaagggtagagacgagagcatctctgacttcagtgtgaatcctaagattacgaactgcctggccttgggccaattacttaatctctcagaatctctgttttctcatctataaaatggggataagaatactgtgtattccacaggattgtcataaggacaaaggagttaatgtgtataatgctcatagaacaccggctggcatggagaaaacagtcggaatatgtgagcttaaaaaattagaaaggaaaagaatgccctgtcctgagggatagcagggattagagacgtggccctgtgcagggacccggcgctcagcagccattgtctcccagcggtgtgtgtggtggcctccatgggttgtgcctggctgttctacagatgttcttttaggaacttccttctgttacagtccaggaatcaggactggaatggctacattttctcccctaacttgttattgtcttctagtgcaggaaagaggaagtgaagggaaatgcatgttcgttgtcattttgctaatattcctgcttcagttaataaaattgatgaaaacatacaagtcttcagagattcccagaatactttccctgctagtcagaatctggaaggtcctttcttgccttatgataacctcgttccttgcagtagctccatagcgggaaaggtgatttctatggattgtagatttcctggcctcgaggattttgtaatgtgttgggtttgctgtttgaatcagtagaatctgggggatagtctacttaaacctgcatattgagggggcatttggtaagcgcctctccatgtcaggcactgctggtaccacgagcttcagacagggcactgttatgggtctcctgccctgatcttctggctcaaaaccagcgtttgttcacctcctcctctggttcccatcatgccctgggcccgggtactgcttcttccttccatagctctcatcctttagaaagacgccagtcattcattcactcatttaacaaataataattgagtgcctactatgtaccgggctgtggaggtggagaagaaaataagatagacagtctctgacttctttcagtttccagtcttacattttaaattttaatttcattagggaaactgtttctgacctttcttaccagaacagatcttgccatgccaaccttggagcaccacacacctgttctttagaggagctgaacaaattgtagctttccatttaattgtttatttgggagttttggctctgtcgttaccctctgagctcctggagggtaggagccatatgcctattgaataagcacttgtcgaatgactgaagcagcaagcgcccgcacaccggtcccatggccccggctcagcagacgttggctgtctgagagctcggatcttgggtgctgtgctcagactcccccaatctcttccacagaaatctccaacctgctggtggctactaagaaagcccaggagtggcagcccgtctaccccatgagccagctgagtttcgatcggatcctcaagaaggatctggtgcaggtgagtcacggctgcagggtgtgggccagctgtggtcctgcctccccacgatggagcagcttggggatctgggggaaggaaggctgtgtttggggaaatcttagtagaaaaagaacagggagactttcctttgatggcaaaagccgtacaaccattgcctccatcctcttcacccttgctgatgctcctcagagacatgttttgaggtaagtggtttggtcaggctttgtggggttacctagaacagcagggaccttctgtggtgagctgaaggggtggcagggcaggaggtggctctccacaggggagcatggccatcacacctcgctgcctgcagcaggctgtgtgatggagcacctccagagttcagtcctgcactttctgatgatgcttccagaaggagcagagctcaggaggagagaacacagggagggaacaagaggacatgcacactctgggcctgaaggagaactatcttgagaaacagatcccagtctttggaggcctttttgcccagaatctacaggctgagcggggagcccaggatctccccaggggctgccctggagctgttgctggtggtgtgaggcccagggaaagcccactttctgttctgccgccgctccccagccctgttgcatagggccacgcgttggggtatcagggagatggtgcggcagccttggagagaagcaagcacggggccactcaccacctcgggagatggcagcgccttggaggtgttggagggtgaggcggaagctgcctgctgtgaaggagcctggggagagtggcactcgggggtttgttactttacctttttcagtgagtccccgagattgttggatggggcttgagggagtggaaatccacagctaaactgcctcacttccctcgtggtacatttcttcaccaaaggcccatcattgttctctattcctctcgtggtgtgagagctgtgtcctgagattacagtcaccagagccacagtttcatagcctcttttctgtgtagaacttgacatagtctgtggggcctgcctcttttcccttgcctcgagcctccaagcaggtaaccaccatcctccatgccttccacatccacttagccaacagagatcaagcattacacgtgcgaggcacgattgctgcttcagcaggctcctgtctattttgagggggtaatcacattagcaagagtcaagttccaaagtagggaagtacagcaggatgtggacctaatcttgagaggacggagatagcttcctgggggaagcggtatcaaagcagagtcccagaccaggcacagcggctcacacagtggctcacacctgtcgtcccagcgctttgagaggccaaggcgggaggatcgcttgagcctaggagttcaagaccagcctgggcaacacaatgagatcccatctctactaaaaatacaaatgaaaaaatgagctgcgtgtagtggtaagcagctgtagtcccagctactcaggaggctgagttggaaggattgcataaggccaggagtttgaggttgcagtgagctatgattgtgctgctgcactcccgccaggtgttagagcgagaccctgtctggggaaaaaaaaaaatcagggtctcctcctggaggatgaactcaagtagctaggcaaggtggagggaacagcatcagaggaggatgaagtgggccatatgggcctttgtgggtccctgcagaatcctgacagcatggtgtcatgacttggccacgggaagagcaattattctgaaagcatatggcttttacgggatgttctgggaatacagcttcccataaccttgatggatcacttcatgacagatgcagctttaatgaatagccaaagaccttgccaggatacagcagacagggtggatgcatcgccattcggctctgacagataacaaatggtggcatttgtgcaaattaatatacctgattaacaatggtgtatgttcctatgggggataagactgattccctaggtatcagcgacagtcccttttctgcatttccagggggtcctcaaataatagaataatggatcttcagtttacaagttttgtggtgctaatgtcaacaacttgacattgcctaagtttcgtgaatcccatttcgatttccaaatattaagaattttaaaagcagaattattgcaacttgaactggaagggtcctcagaaatagatcatggtatggctagggctttgcacggatcatctcattcagtcctcctgccactcatctgggggtattgttccctttcacatgtcaggaaatccaggacacatcaccccaggctccaccttcatcttcacattgccatctcctctgtgaggttgccagggcaaatgcaggtgtactttgcaccactaattttaaatcctaacgtgcatgcacacacatgagcacacacactggataaatggatgggaaacagatggttccagtgtgagaaactgtgcctacctgtgccagagggcttcagataacacatggatccaccagatgggtttctacgcacccccccgtgtgcctgagtctgtaccaggagcctccatccctgtttcctggtttgattcttaccacagccctatgaggtcagtaccattattacctccatttgcagaaagtgggcagagattgcccccatgtcacatggccagcgggtagtagagctgggatttgcaagcctcttcacagggtagcacagcctgtgagtagaggagctgcctgggggctcctctcttgagtcttctctggaggcctggggtgggacccatgtggctggctgttgatggccctgtttgcagtgtcctgacatgttaggactgtgttttggccaaaggctgttcctaggggtagaaagcaaggagccgtttagggagtaggaggactgtctcctggggcccagcaaatgtcaccactgtgtttggccaaatagcttgttgttttctctggaggcctggggaccacgagctggggcagggagccctcttgcctttgccccatcccattgatagtccatgttcccattgaggacccattcccagacggtccatcacttcagggcacagagaggtcacccagccttctgcttcttccctcagggcgagcaccttgggagaggcacgagaacacacatctattctgggaccctgatggattacaaggatgacgaaggaacttctgaagagaagaagataaaagtgatcctcaaagtcttagaccccagccacagggatatttccctggcaagtgtcttcctctgaactcctcccctcccctctcccgtttctggagccagtggaacacaatgggttgagaagaacccttgcccttcttgtggcccagtggttttcaaacttgccttttactcagaatttttttctccacatatgatcttagtggaccctgcatgtagagtaagtgaggtgggttgaacagctcctcacactcagcctgtgccctcccttccacccccaacccccacctttcctaaggacaggtccaggtggccgtgctgtggagccctaggactctggccaaatggttcaaagttcctgatacagtccatggctctcaccacacagtctggaaaacgaaagcccagaggagtaaaaggactcacccaggattctacagactattagagtgacacagtcaaatcttgagcagagatcggctgccttcatttcccctttgttccagcatagtgctaaatatgggtatttcccagagctgaaaggaagagagagaggtgggcatgagtatccagtgggaaaattcttagccagcttctcccaccagccctgctctgcatcctgttaggttttctaaataaacctcacatccctgccaggttggcccagagaacaaggcttggcagtgcctctggacagccaaggccagaggattgatgttcagggcctggggtggcgacagtggtgagctttcctgggtccactggctttcccctcaacagagcccctggggagcagccccctggaggctggcctgagacattcctatgtcctgctcgcccacaggccttcttcgaggcagccagcatgatgagacaggtctcccacaaacacatcgtgtacctctatggcgtctgtgtccgcgacgtggagagtaagtgtgttctctttcaaaggggtgggtggcctggctggggagcttgggtgctgtggagatggtggaggctcttcccaccctcacgttgcccaggcttcttgcctttctttttgcagttgaggagattgagggactgagcaggtcatttgcttaagttaatagtggaggtggaactaaaaccaattgcttttcattcatttgtgtaatgttttcttgtcaacgctggccaagaaccctacactgtgctagacctgggaggctgaggtgagtgaaatgaggtcaaggccacaagagtcaggcccaaggagctctgggcaggtgagcgaggtgagcgcaccccacaagcagcaagacgctggctcctcgaatggactggcttccattttaaccacaggcaggcttggccctttcttggttgtcaagccactgagccggtgggcccttgggctgctgctgcacactgagatggaggggtggccttggcctctgagttcctgacatgtaagtttggaagaagagcgattttttttttaaccccaagtgacttcttccctgtggaatccaacaatgtgagctgttccgtgtactcacacaggagtcctgttgagagggaagttttgccgtgtgagcggcctgacctctgcatcacagtgtgttgtagaacagcagcagtggtggcggttgttcccagagcccttgttctctgtgtcaggccctccgccaaggctttccaggccttgtgacatttagccgccatctgttattacagatgagggaattgaggctcagagaagtgtcacttgctcagtgccaccgtttagaagaagagcttggggttgaacttggcctttccagctctgaagcccctgcaccattgcaccccccaaggatatctgtgtactctgaggccgagtagtgtccactgaagtggactgtcgtaaggggatgaaggagaggaccgtgccacagaccaggttccagacatggctatttttatgcctacagatatcatggtggaagagtttgtggaagggggtcctctggatctcttcatgcaccggaaaagcgatgtccttaccacaccatggaaattcaaagttgccaaacagctggccagtgccctgagctacttggtgagaatgtcctgatgtccataatggtcccaccagaaaccagagtgtcctgggaggggtggcaggaaggaggtgctagccaagcagctagaggggcctgtccttgggttccatggggccagggctctgtggttgaacaaaggtgtgcctggtgcttactgaagatggtcgtttggggccgttccctgtgctcacatgagttctgtttagtgggaaatgttagcacgtcagagggccgacttgcatactgcagcatatggatggcaaggctgaaagcagtgcagtacgtgttgagtgaatgagtgaactgccagcatctagtagctgacgtgtggagtgctcaccatgggtcagctgttcaggcgtttcacagattctaatcagtatcatgctcacgaagcccaatgagatacgtgccactatttagccacattcagtgatgagggagctggagccaaggggcacctgtgatgtgcctaagtcacacagatgattggcagcagggccaggctgtccagatctggctgtagctgggggtaggaagagatgacctgagggaccagggttggaaatagaatgcgggaaggagcagcttggctaaacttgacctttttactctgcaggaggataaagacctggtccatggaaatgtgtgtactaaaaacctcctcctggcccgtgagggcatcgacagtgagtgtggcccattcatcaagctcagtgaccccggcatccccattacggtgctgtctaggcaaggtgtgtctcccctctcttccctctggccccaccccgagtcaggggcaagtcagcagagagaagggctgggctggggttggtctccttttagagagtcattttttttttgtattttagtagagacggggtttcaccatgttggccaggatggtcttctcttaagtccttgaacgagcccccgttcgtcctcctgccctgggtgatggcccccaccctgggatgttttgctgatcctaaggccagggcttcagaagcctggcttcacacgaccctcctggggagcttggaggcagggacccatctgctggctgtgacccagactgatgtatcagaagtgctggtggtggcttggagggctgcacgcctgcaggccccccgcacagggcctatgtggccatgggccatgtttgggcacactgcttgaagtagttccttcattggctcactgttctggctgcagtgacagtaattgaatccctaggagatcccagaaactgctccatcagtgtgtctgttgtcttccagaatgcattgaacgaatcccatggattgctcctgagtgtgttgaggactccaagaacctgagtgtggctgctgacaagtggagctttggaaccacgctctgggaaatctgctacaatggcgagatccccttgaaagacaagacgctgattgaggtgagcaggtgtttcccggggcgtgaggcaagtgagggctttcaggtgctcgtgggcttcccaggagttgtcggaagcctggcactgtgggaagagatgggcatgggtttgaatctcttcacgggcctactgggtgtgtgacctcacaaatgtaactgaacttccgtgagcctcagtttcatcatctataaaatggggataatcagtaactacttgtagggttgttgtgaagattaaataatgcatatagagtgacaggcatgcagtacaagctcgatagatgttatagtattatttatctgagattttaagtgcctgttattcagcattaccacacaaatacatatggagttcctattgtgtatcaagcatcaagcttgggaaaagctggaggttcactataaaataagatacaggccttgccttcccttgagggccttagggtatggtagggagttaggctaaaataacaacggtaagaattccagaaagaatacctgaaagtgtcaccctaagagccctgcaaattaggtaggatggtgtcattaccctcatttgacagatcaggtaactgagactcaggtagccccacttacctgggttcctcagctagaatgcaaaacaggcgaggtgtggacctcctccaaatctacctgtggaaaaagtggagactctaactccaaaggggtaaagtagtaaaaatcacaatgaaagaccattgtcccttcatctcagtgactgcaattggaatgtgctcctgttgtttagagggggcaggcatcagtttcggctgtgagagcctggtttcagtgctgtgtcgggagcctgggtagtttggtgtgcctggccttgagtgtctggagtggggaaaggaataacagtgatcaggtgggaaaggccatttgggttcagatttttaaagtccctgattccaggctgcagaacctacattttactgggggtggcatgggacaaggaaggatttgggtggaggagggaggggcttggaggtcggccttgggatgttcttctggatgcagtagctgggatggacagaggagagacctggagggagacaggggccccgagtctctcagcaatgggagccccatgtccggaaatggcagcggaagtccagagtgcagggtgggagatattgaagaggtagaacctttatgacttgccagttaatgatggtgcaggacttgggaaaggatcttaaacccgcagggaaaccatcagatctacagatctgctatttggaattttcagcctaggcttttgggaaattcatatttatttttaacttccttggatccttggaaatgaaacaacataccctttgtcatcagtcagtatttattgagcacgtgctgcgtaccctgggctgaacagcatacagggtggtgtaaggaaggacccgtgtctttaataaaataggggtctctctccacctaagtccccttgggttagatggcttttctgcaggctgcactgacgcagggatgtgtgagtgacactcaaggacaagagcaattctcagctccttaattccagtcctccctcctccctgtcctctggggcctgcccaccccaccccaccccagggcccacggggaccagagaggaacttagtacccttggagtccagctatgaagtagaaactggaatgcagtggtttcacttcatcttccaaaagtagcataagttcttgtttctaaaatttaaagtaataaacagttgaagaacatttttaaaatgaaactattaaaaaaagaaaatagcaatcactgcattcttgtcatccctgaccactgttaacactttggcattttgtcttccagcctgtttgtatctctcttttttaaacaaaattggggccatgctagatagagttatataaaattctgagttttttcatttaatactgagaatgctttcctgtgagattaaatcataatttttacaaatttaatgtaagagttaattgttttgtttaatttacttgactaattttatatttggcatttaagttttcaaatttccagtgttctgtctaattctgcaggaaacatccttgtacataaatatttgttcatatctgatttatttctgagtcattcagtcattgaagttaatgcatcagagggtttgaagaatctgaagatttttgtacatgttgcccaattgtattccagaaaggctgcatgcctttacttgaatgaagctttttgggactgggctatagtgcccagtctccttgaatttggactattcagtattaggactgtgatttccccttgcaagaataaggcagcagtaacaaacacttatgaaatctacctgtaagtggagatgttgagaatcgaatgaggaattggcaattccacctgacctggggctgagaagtttgtaggtggttcctttggtttcttccatgtgcccctcttgtttacagaaagagagattctatgaaagccggtgcaggccagtgacaccatcatgtaaggagctggctgacctcatgacccgctgcatgaactatgaccccaatcagaggcctttcttccgagccatcatgagagacattaataagcttgaagagcagagtaagacctgccatgtgctgctttaacccagcttggggagaaacaggagcctgggtggcaatccctggcaatcgactgcctttcactctgttttcttttctcttctgttagatccagatattgtttcagaaaaaaaaccagcaactgaagtggaccccacacattttgaaaagcgcttcctaaagaggatccgtgacttgggagaggtaagttacacccgtgctgcttgctgctgatggcagagccctccgccatccacagcgccactctctgcacgtacagctgctctccattctttttcattctggggccaggtccatgagcgaaagcaccttactgcatttgggggccactttcatcacaagggattgtgtctttctccatgtgacacacggcacggacggaatgcacgtccctgcctgcatgcacgactgtgtatgcacacgggactctgggcagctcccttgagagacttgagttttctctacaggacagaagagaatggaaagagggagagatgggggagtaggtatagatatggtggaataggaaaatccttgcctctgactttcccgggcatatatatcctgtaagcttctctctttttcttttgcccccgagagacagggtctcgctctgtgtcccaggctggagtgagtggtgtgatcatagctcactgcagcctcaacttcccaggctcaagcaatcttcctgcctcagcctcctgagtagctggaactacaggcacacgcccccatgctggctaatattttttattttttattgtagaaatggggtcttgctatgttgactaggctgctctcagactcctggcctcaagcaaggaggcctcccaaagtgctgggattataggcataagccaccatacccagccctgtaaggctctttagagcagggataggtttattgcacagaatcccaaaatagagtgtcagcgtttctttggaccttaaatgggagtttccaaacagttaattgtgactagagaagctactgagatttgtgtctttatacagattttctgtagtctggttaatgaaacagacttgatacatctccaggatctgctgtgtgccagccactgtgccaggcattgtcagaagcatggcatccttagttccccccaccgtccccgaggccagtttctgtatgcagcgagtgcatcaggagccagctccgatttggggacttggccaccactgtcgctgtcaggtggcttggctggaacctgatctcacgtcttctaaagactcctcatgcatttgctcttttcagccatgctgtggggcctgtcctgtaacgtgagcccagggcttttagagaacggcagttgtcctgcaggcccagaaataaccttcatttcctgtggtcatagaaattgggattgatgagttggttcatcgtcacctgctactttgtcttggctcagtaactgaggggacagtttgtgaggccaagagagcgagggggctgtagtgagcaagtacagtccaggtgagaggcttctgcctgcaaggccagacagcgagaacccctggccctcaggggaacggctgtgaggagcaagacttctgtgtgttccgtggcctacgatggggcttccctgataacagcacatgcatctttccctccagggccactttgggaaggttgagctctgcaggtatgaccccgaaggggacaatacaggggagcaggtggctgttaaatctctgaagcctgagagtggaggtaaccacatagctgatctgaaaaaggaaatcgagatcttaaggaacctctatcatgagaacattgtgaagtacaaaggaatctgcacagaagacggtatgttatgcaaggctggggtccggtttaaagatttggtgactgtctagggtcataaaggccagtgcaaaacaggcactccgtggccttacctgggcgtctgacatgctagctggtggttcccacacactctcaaggcttccaagtcatatgtcaaatccctcagcagctgcagggctccaggaggccacccaggcccctccatccaggggctggttccagcactgtctctccacgtcacttgcacttatgccttatgaaactgattcctactctacctccacccacttcctgttctgatccaatactagccagggtatttcattttctagttgtctaaatcaaagtggcaagtaatatttactaataattgtatcttatttgcaagccagcatctactcatggtagtgaaattgacagctgatgataatttttttttttttttttttttttttgagacggagtctcgctctgtggcccaggcgggagtgcagtggcgcaatctcggctcactgcaagctccgcctcccgggttcacgccattctcctgcctcagcctcccgagtagctgggactacaggcgcccgccatcacgcccggctaatttttttgtatttttagtagagacggggtttcaccgtgttagccaggatggtctcgatctcctgacctcgtgatccgcccgcctcggcctcccaaagtgctgggattacaagcgtgagccaccgcgcccggcccgataatttttgaaaacagtcatttgcctgtggtttacagagcactctgactgttatctcagtgagtgcttatgcctgtgaggtaggtacaccattgttaccatctccattcactgctgaggatcttgaggcataagaggtcaagtaacatgcctgtaatgaaggggcgaagctggcgtcacctcagggcctctgtctcatatcctgtgcccttgcctctcccatggttccctcatttggcagcctcagactgatggatgttttttctaaacaggaggaaatggtattaagctcatcatggaatttctgccttcgggaagccttaaggaatatcttccaaagaataagaacaaaataaacctcaaacagcagctaaaatatgccgttcagatttgtaaggtaaaaaataaagacatcatgttacagattaagacatcaggcactctgtcctgggtaattggtttgtaatttgactctaagtgggtaagtttatgataattatactgtttgtttttctctgcattatttagatgaaaagttagcttctactaagaaagtaaacggatttaaatatggttattttaatgtgtatttatttgaatcagtttgttcttaatattcttgcataaaagtcagaaccaaaaaaattgtcagtgatatgtgaatgaaatgacatttctattttttctgatgaagtgatagataatacaatctaaagtgactttagcaatgtgcttgacttttacttctctctctcaggggatggactatttgggttctcggcaatacgttcaccgggacttggcagcaagaaatgtccttgttgagagtgaacaccaagtgaaaattggagacttcggtttaaccaaagcaattgaaaccgataaggagtattacaccgtcaaggatgaccgggacagccctgtgttttggtaactgaatcaaaccactaggttttatcaatgcttcatagagtttacactgttttaataggccctttctggctatattaatgtgtctcattcctctggcctgactcaaggttagagaaggtttagaacatttggaattgattgatatttatcttcaagaaacacacctttcagcctgtttcattgaaagcagcctatataaatgactgagcttcatatgacaccgtcttccaaggaatgaaagaaatctaaccaccagctcaacattcctagctttccaggagagggcattcatctgatgcagttcttaaaactgtgagcaggtggagagaatctagttcctttcttaaacacattcctgcagagggaggctgtaggacagagtgggcattgcagattcagggaactcctggacagagcagagcaaaacctacgggagacctggctgtctcatgaatcaccagaggttcccaggttagaaggccacacactggctacaaccatgtctcagccaggaacactgtccaggggagaggctgcttacatctctaccgcaccctgccacgtaaccacataacgacataaccaatcagcactcccctaggtgcatcctacatggacacaaacatagacctctcccacttatggagcctaaacttactcattcattcatttaagaaaatgcatcaaggtcctgctttgtgccagtactggagatatggtgaacaagtaggccgagtttagagtttaacaggctaggcagccaacggcatggagcaggaaacatacagaagggttcgggcttggttttctggaagtcgtgagtattcagaagaaacctgaaagattcatgcgggtttagacagacggttgctagacagcatgcgtgactaggaagaatgagacaagagcagtcgatttcccaggaactgaacctcagtgaggtcagatcatggaataggaggtttgcaggaggaagcttgagtcatggagctgggacttcatctcaagaacaatgggatgctgctggagagtttaaggagggagactttgttttaaaaagaccaccactgaatgaagggaacaagattggagccagggagtctggagccagggagtctggagccagggagtctgatttggctgcttcaacagctcaggccagagctagtgacagcatgaattaggacagggactgggagagtgacagtagggtttgagagaagtgagtaggttcaaggagtatataaggagattgggtgcggtggaatgccttcatttttggcttgggcaagtgggtgtcattcagcaaagtaggcaatgctggaagaggattggacagcgatgccacattgtgcagtgaggccactgctgtctcatttagagcctgcaggcaaatcagacctggggctcatcattacacggccacctcctcccataccctgagagcatgttctcagtgaaatgaagagcacagacttggcgtgttattttagggcagatacgtgctaccgagagcctgtaaaggataccgtactataggtcagatgtgcaccatagcagcgtatacatggtatgtgtaaaatatataatacacagtcagatgctgtattaaattataagaaaaaccgaagaggtgatttttcagttatcctgtaatgtcggatggagtgtgcctcccaggaaatgaagttttgtgttctgcttcctttcaaggtatgctccagaatgtttaatgcaatctaaattttatattgcctctgacgtctggtcttttggagtcactctgcatgagctgctgacttactgtgattcagattctagtcccatggctgtaagtcctacttttctcttcatttgaatccagtacccatttaaaatgtgtccatccctctgcttggttaacttttgtttttaaatggaatccaatgaatgtattataatgtaaaatgtcactttcccattaacttggtttgctacttgacagttatttgtgaatctctcaagtcttgctttcacaacgagcccggagttctataggatgaccttgactctcaaggatcttatctgtgtagagatgaagggcagttttatgggaaaatgagcaagttaagtggggtagcactgggtagggaccagccttgtctgtgcctccttcattcctaaatcagatcattttcttgggaacagactccttgaccagcacaagcacaaggagtggttggtagagtctaagacactggttagagacagatcattgaaagctaataaggattttggatttttatttaaagttactaaggagaaaagcctttttattgctacttaaatttccagttgattgtagaaatttcaccttaatctgtttggcatttatgtaaatacttgcaaagttaaacgttttgtttgattttattttatatagttgttcctgaaaatgataggcccaacccatggccagatgacagtcacaagacttgtgaatacgttaaaagaaggaaaacgcctgccgtgcccacctaactgtccagatgaggtatctatgggccacgtcacagtaataacactccatttctattatgttttcgcagcttgagttgtccagcaatgggtagaggggagagcgaggaaatgatgcagtgaagtccttgtaaaatagttttctgaagctgaatttcacataagataactgagaaatcgcctttggggctagatgatagccaccagttaggttcagagcaaggattccctccaaaagccagcccctctttatccacttgcttgccccagagggacaggttttggtgtagccttagtgtgacaaatacatataattgcattttttgtgtgtaagtttatcccacttattagcatttataattcagttttctaagtgaattgagcctttaatactaaactcttgagactgtgtaagacacactgaacagtatgagtcagagagtgaggcagccagtctggaaagttcaagtctgaactgagattctgcttcaccctctaactggtttacaggaatgacctggattttattgcagccagtcaacccttgagcttctcaaatgttaaaatattatttatgaactagagttgtatcccattttctgtgttttaaactattcaaatactcttgtttttctagtctttaaggaaaagtcattgcatttccaaaattattttcttactcttgatatttctgttattttttaaagttcccagatctaacatttttactgttgttacttctttctttttacaggtttatcaacttatgaggaaatgctgggaattccaaccatccaatcggacaagctttcagaaccttattgaaggatttgaagcacttttaaaataagaagcatgaataacatttaaattccacagattatcaagtccttctcctgcaacaaatgcccaagtcattttttaaaaatttctaatgaaagaagtttgtgttctgtccaaaaagtcactgaactcatacttcagtacatatacatgtataaggcacactgtagtgcttaatatgtgtaaggacttcctctttaaatttggtaccagtaacttagtgacacataatgacaaccaaaatatttgaaagcacttaagcactcctccttgtggaaagaatataccaccatttcatctggctagttcaccatcacaactgcattaccaaaaggggatttttgaaaacgaggagttgaccaaaataatatctgaagatgattgcttttccctgctgccagctgatctgaaatgttttgctggcacattaatcatagataaagaaagattgatggacttagccctcaaatttcagtatctatacagtactagaccatgcattcttaaaatattagataccaggtagtatatattgtttctgtacaaaaatgactgtattctctcaccagtaggacttaaactttgtttctccagtggcttagctcctgttcctttgggtgatcactagcacccatttttgagaaagctggttctacatggggggatagctgtggaatagataatttgctgcatgttaattaattctcaagaactaagcctgtgccagtgctttcctaagcagtatacctttaatcagaactcattcccagaacctggatgctattacacatgcttttaagaaacgtcaatgtatatccttttataactctaccactttggggcaagctattccagcactggttttgaatgctgtatgcaaccagtctgaataccacatacgctgcactgttcttagagggtttccatacttaccaccgatctacaagggttgatccctgtttttaccatcaatcatcaccctgtggtgcaacacttgaaagacccggctagaggcactatggacttcaggatccactagacagttttcagtttgcttggaggtagctgggtaatcaaaaatgtttagtcattgattcaatgtgaacgattacggtctttatgaccaagagtctgaaaatctttttgttatgctgtttagtattcgtttgatattgttacttttcacctgttgagcccaaattcaggattggttcagtggcagcaatgaagttgccatttaaatttgttcatagcctacatcaccaaggtctctgtgtcaaacctgtggccactctatatgcactttgtttactctttatacaaataaatatactaaagactttacatgcatatgccttttaatattaagatttcattttcaaagcatttcaaacaatttgcttacatagaaaaataacagtatagttttggggggaggaaggggtgggttacggtccttactactaacaaacaaacaaacaccacttgatttgcacttcttcactgttgtgcccagtgattgataacggggcacaggccagtatggatggcatgtccactgtgctgtagtccagacacctttgtttgtttgttttagttccttcaacctcttcctgctttgactgactgactttttgcagctctgttgcaaaattcaccatctttcctttcttctgtttgtttgtttgtttgtactatagtggaggtgtgactaagcattgaagaggctgaatgcaacaggaaaatgggaaagagaagtgcagggcctgaaaaacccattagtcatctgctatatcactgaatgatgcctaattcttatcagttacttataggtagtatacttagaaattaccttaaactttctagctgtcagtcattttccaacagaagctagtatatgcaataaattagaccaagtgaaattctttacaaagcatacaacatatgtaccaattctagacttcataattaaaacaggatatccacatcatagttaaaaataacaagtccccaaagtgacgagatatttaatgatctgatttcaaaaagccccggattgagatcccaaattccctatcaattaattacagtcttataacataaacaaacttagaaatttctagatggcaaaaggtttctcatgcatttaataccaaggtcttcaagaaatggtgatgtcaaaagtcatcatagtccataaagataaaacttctttcacaagtaaattgggttaaataactgatttttcaccctaacacactatcaaaaagagagagagagaaagcagagagtgaggtatagcttattagctcaaaatggttataaatactgtgactccttaagactccatcagaaagtgcagtattgactgctttactatactatattgtggaaatagggcatttagtgatcaaaataggccccattctagtcattagatcattactagtctacgctatgaaatgagcacagaaacccatgttcctttccacttacaagtctgtctaaaggctaaaggtctgtctttaggtgaattgaaaggaatagttgctattagaattagtgctattagatcagggatcagcaaactatatataaatggccagatacttgaaattttaggccatatggtctttgtaggccatacagtctctgttgaagctaatcagttctgcccttgtagcgtaagagtgccacagacaacacgtaaatgaatgagcatggcaacgtcccaataaaagtttatttatggacactgaaatctgaatttcatataaatttcatgtcataagttttcttttttcctccaaccatttaaaaatgtaaacattagtcttagcttgcaggcagcacaaaagcgggtggtagaccaaatgtggacccagggtgtagtttgccaaacccttttattagatcaccaaagttacttttcttaaaataccttctatttttcacagaaggtataaatggtaaacaacatcttaaagcatcggtagtagtggataccttggacatcactgtcactctcttaccgggtttaattttgcatggctggtgtgggcgtaattgagtgtgcatgtagagcatctttataatattaccatcagcacatttggtacttgcacccttgtagttctaggaaaagtcctaaaaatctataaatgcaattacttctagggaaagtaaattgaaatgcacattggcttataagaaactcattcttctaaggctcaggaaacaacactgtttcccatttattgcttcaaacttcttttatatatggtgtcagaattattcccagtcctaaatcaaggaatattggaacattgttagtttctccaatggattgtaagttagcacactgattaagatgcatctgactctagtggaaaatgtcctcaattgatgtctcttcttattgctattttttatttggcatttctgcctgctgcacaacacagttccttctgggaaactataaacccgtatttaaaggatatggctagtttgaatgaagttaaggcagcgatgaacagcagagatactgcagagaaccttagggggttattaggagagagcttaactcagtatactcgcttcttttttaagtaagtttccatgtaatatgctcctgtgccctgagaatgctggtcaacacattccactgaaccaccttctggggcagagatgagatatgatgagcctcgcttttcatttcttaaagatgacacctatgagaaaataaaattgcagctagttttaaaatctaaagttggcttattcattaaagatatttataagaaaagcattccactttgacttggtgaatatagaataacaggataaatacccaaactatcaaaaaatacacaaacccctttgttaaataagacttttaaatttctgtatcaacatcgcctttggaatttctgcaagacacaaaccagtctcagcaccttcactcccaaccccaactttttgggaaaagaaaaaattagagcactgcatgcagctgcttctgctgatcacagctagttaaacccacggactcagaatatcaacaccgaatgtcagtattcctctgaaggaggagtggctaagacatcaagctgcatattgaattagatgttaagtgtgcctggtgacaagaggagtggtgagagaataaatcaataggtgtagaaactgacaaatgacatcaaagaaaacaacatgaaacattctagagagcaatgggaaactcagagctttggtctccacaataatcgcctggcgagcatattaaaatgcaggttttcaggcaccatcccagagattctgacctgaaagtgggccacatgtcctcacaagtggtcacagtgatcagcacagtaaatcagatggtgtagcactgctcagcttaatgcctcttagtttcagcttttacaaaaataagtgcagcaagcttttatcaatgcagaattatgtgacttaatatgcaagaacttagaaatgactgatgagtaaagcttccagtaacacacaggagccttctcacgttgcaattaaaactgcaattgtttttgaaccaacaacggtcacaatttttaaaagtgcagccagcctcagagggaacagatgataggtctctctcaactccttgctaaagtagttctcagtggtccatgttagagggatgacaagactgaaagaacgctgcgtcctctggtatctcatttcaaagtggcttactgtggggacagaccaatacaaagcgtcttcacacaagcccagtgtaaaggaatgtttcacagagtgaagctgatgggcaaagaatctggcttgaatttctgcctcgacatttttttcctggtagtaaagtatgtctggggtttgtgctagaatgttagaagggaagcaggtgagagggtagatgaaaggagacctgccgtaagttgatagttgtcaaagctgagttgatggtgacgaggggttcagccctagagaagggctgctgcaccaaacagcttgctcacctcttaggtggagcctctgccccaaaaacccttcctcccagtctccagcctcttggttattctctccagctgccttcttcattagggccccttcgctggtaggtgatctttctgaatgttggaccccagccactaacaccatcagaccttacttcaggtataaagaactctttttagcagctttcctcctcttagaagtcatcagtccattctacaagtgagattttccaaagactgggggagggaagcagactgctcactctgggatctgggatgctcctgctcttctcacccaccttccccaattcttcttgccatgtagttatctattctttcatgtcttggcatgcagcaaagcaacagcctgggtttctgtctttctataccatcttcactgtcagaagccagataggaaatttattacattcttttattcaaagggcttcccaatggtgctacaccattcacagtgagaaccaactgagacctatgaaatcagcaaaaaacttcactgagcagcacaggaaaatattagaacaggaaatgaaagtgggtgtcactcatcttacaataaagacaaagcctgcaaacattacgttgagtaaaataagacattcaaaaagagacagacatggtatgattacaccaatgtgagatataaaagttagtcccagttataaaaacagaaagtcaaatgatgttctcttcaggagctgaggagaagagggggaaaagtgcagtttattaattatcagattttacttttgtaaaatgaaaatctagagatctgttgcaaaataatgtaaatatactgaacattactaaactatacacttaaatatttaatagtaattttatgtttttatcacaattaaaaatttaaaccttaaaaaaaaaaaagaaaacgggtttcactgtagcccatgtgatactgggagaaaggtaattcttctgatacgccctatcaaagatatctaacttctagtgtaaggactggtgaatggggaatgatgatttaaaattttgaaagaaagctcagtgctctgggagaaataaattcctacataagaaccacaaccacaaccacaacaaaacacaaaagagggaaagaatataaagttagcaaatatttttccttctattttgtatttgtaggatctagacatccattccttcataagtggtctattgcgggcactgggcttgtgtgctatgaggtttacctggatgaatgaaacttggactatgccctcccacagctcatatcctaggaggggaaggaagaggaatgcaaaacataattctaaaaggggactgtcactttgacaaaagagaaatagaagtgaagtgctaaagctttttccagacaaggaaaatgggcggggggtggggggggtgggtttgaaaggtacaggcactggtttcatggataagatagcatctgagttaggatttggagatgaggtcagatatggacatgaggagataggtggtgacccttccaggagaaaggcagggcctgtgcaaaggcagatggcaaaaaagccaggcctgtgatggtagcagctggcaggcagaagagggcagtggcaaatgaggttgaaaaatgaagctggcctcagtcatggagggctggaacgccaggctaaggactgtaaacaggaccatacccttgatcttggaatatggcaagattaataagcagctctgtaaaaagtatggcaatgaaggagacaggcattattaagtctcaccaggaggctattgaacttgtccctattagatacatgcatgtgagcaaacacacagattatatgtgatttaagacttgatttaaaatgtagcatgaaacttacagatgagacagaacaaagtggtatatttagaaaatctgaaaacaattttgatgagcatttatgctttgaataccaaacaaaaggaagacctttagagaagctataatattctagttttacatgtctaatattcaggtggaaatcaaacacaatagtcattttagaggacttcatctttagcagggtcttttttagggttggctgaaaccactctatgaatagtttgcacccagtggttccattctgtactttggaactacaatccaagtctaatacttccttatcagaatgggcataacttcaacggaggcccctcaccctcatgcccctgggcaatcctactatatccccaccctaccctgcccactgatctccactcccctaagtgactattgcaagccttctcttttctcgaagctccaacagtacaccctcatcttcactctcagctgatgctttgctttctatttcaccaagaaaacaaaatcgaaagagaaatcttaagacgcacagtgactaacccctggtgtctttacttaccctcacttccttggtgatctcatccaatttcatgcaattcacaattatagcgatttacaggaatgcgatggttctcaaatatgtacctctagaggcccataactctcccctcacctccagacttgtataatgaacaccaataaaggaacatcttcacttagggatcttatgtctaaaacgtacccataaaacttgctccacccacacagtcttacccatctcaatcaataacaaattcatttttctaggccaaaactcttggggacttggctcctctcttaccctcgtataccccactgactccagcttccaaaaatgtctccagtccagccacatgtcactgcctctgttgcttccaggcttgtccaagtcagcatttttacttggattgtaccacagcagctccctaactgaccctgctatgttctacattcattatttaacacagcagctaggcatgttaaactataaatacagtcaattatccctctactcaaagcatcccagtggctttctatcttagagtaaaagccaaagtccttacaagggcctaaaaggtcctaaattgtctgtgccctctgcctccccgaccccactgtgacatcatctcctattctccactttgctccctcttcttctgccctaaaggttgcttgctgttcctttaacagaccaagcatgtttctgcctcagtacctttgcacttgctgttccctgtccctggaatgtactttacatagatattcatgtggcatactccctaaagttctggtctttgcccaagaatcagttttactatgaacccttccttgaccacgtatttaaactccaagacttcccagacactctttagcctccatcttattttctctgcagcgatcactattccttttactaattttttcccctaaatgtaagttccattcttataaggattttgatgttttgttcattgccatatccctagtgcctagaacagtcctgtcatatagtagacattcagtatatactggttgaatgagtaaatgaatacctttcaaaaaatattttctaagcatccattcccagctccttcagcaaatagtcatgggccatggtctctgacactctgacatggaaaaactgaacaccgtaatctactagagcctaccaaagcaaaggttaatgtgcttctcgctttgggcacctgccctctcgttagaatttcaaattagttggctcttttaaatgttgctcaccaatccaatcttttgcacacatctactatgaaacccattctctatgcagtcgctattttattcttggattttaaaaagttaattttcttttattaaagcaaatctttttattttcatgtaaatgtagactttcttttatcccattgatttccaagtgaatgtagaaacagaatgtcacaatatcatttgttgactgccagtttttaatacaatgtatcttaagctcaatttttaagctcatgtcaataattgaactggtggctagttttcaaagccatcgtaagaattggggaaaggggaatcttgactatccctcagaagattcctttgggatatgttaatgtcaacagtgaattccattaggctcatctgctatcagtccaattaaagatatttattattgttgttcttctgaaaagaatataagcatctagcaggtagccctttaaatacaaaatgaaatttgttttcagaaaattctgcctcaaggactcctcagtctcacccttaccttcagccccacttcaccttttctaagtcttgtctcttcagtggagtcaggtatacggagaaccaaaatgggactgcactagttctcctgagatctgaatcaagcccctaatgtccctttcttatagcttcaagtccagcttttagatttcagacctacagaaacatgaattaattttatcattatttctgcattaaacatttttaaatttttatttaaaaatataactttctcccattgttaaaaatgtttcaaaatcaatatgcttcattctgtgacattaatgatataataaaatgtctctgtctgatatatatacataacaaatgtttccaatgttcatattcatatttgcctctcagctacttgtctttcttcatatgaataatggttgagtcctaactttggatttaacgattcatccccaaaaaggtattgcacagcactaattttttttttttttttttttttttttgggagacagggtctcgctctgttgcccaagctggagtgcaatggcgggatctcggctcactaaagcctctgcctcccgggctcaagcgattctcctgcctcagcctcctgagtatttgggattacaagcgtgcaccaccacacccggctaattttttgtattttctgtagagacggggtttcgccctgttggccaagctggtcttgaattcttgacctcaggtgatccacccacctcagcctcccaaagtgctaggattataagcatgagccaccccgcccagccgaaatacatttcaacagcttgctttccttacttccagtttttaaccaaaatcactttttaaaagtactttccaagttattgtctagggttaatatatagataacctgtgctcccataattgttgtttaaagtaggcttatgttttaaaacatattttgtatggtaggtgtttgtcacacgattcggatctatcacggtccatacaaaaatccacacagcattcattacataacacaatgtactttttggcaagtctgtctgcattatttgaccactgggtggcagcattaggctccatatgaaaggaccaagcattcattttccaggtcttttgttcatttttctttcctcttcccctcatcacatcatctcatcatatattctgtggttgattccctggaacaggcagtcagcctcctggcaggggagatccctggaatcagggtaacacaagaacacaccgtgcaagtagataacactgctgtgctgcatgctggacaactgccacatatggcaagtgttaaatgaaaaacaaaaatcaggccgggcgcggtggcacatgcctataatcctagcactttggaagaccaaggcaggcagatcacttgaggtcaggagttcaagaccagcctggtcaatgtggtgaaaccctgtctctactaaatatacaaaaattagctgggcatggtggtgggtgcttgtaattcgagctactcgggacgctgaggcaggagaatcacttgaacccaggaggtggaggttgcagtgagctgagattgcatcactgccctccagcctggatgacagagcaagacgctgtctcaaaaaaaaaaaaaaaaaaaaaatcacaacttacacagtcatatcaaacagctgaaaaacctcttacatttttctttacattattgggactatgtcaaactggaaaggtgcttaagatatatttttacctattttaattaaaaggggaagggtgaaatgttttgtctttgactgattataattagatgttagatttaggtgtttaatagacatttaataaatgggctcaaaagcttctcttttaaggtagacttctcccaaccatttgacatagaaggacctcagaatctgaaatttcaaactcaatttgtacattcatattgacaggattacatagctgactataatgctattaataactgctagagtgtatactacaaatttttaaataatttatttctgatttaagttttcccaatcatagttcaaatattcaagacatgcagtttttgagaaaattcacagctcaatggcaattctaattaattattacaactgactagagaaatggaaggggtagtccatttaaaactgatttctaattagacctagatcttgaaaaactgatctgatctgtttgctcataactaactacttttagg

SEQ ID NO: 866 - DNA, 4880 bp, Homo sapiens
gcgcttctctgaagtagctttggaaagtagagaagaaaatccagtttgcttcttggagaacactggacagctgaataaatgcagtatctaaatataaaagaggactgcaatgccatggctttctgtgctaaaatgaggagctccaagaagactgaggtgaacctggaggcccctgagccaggggtggaagtgatcttctatctgtcggacagggagcccctccggctgggcagtggagagtacacagcagaggaactgtgcatcagggctgcacaggcatgccgtatctctcctctttgtcacaacctctttgccctgtatgacgagaacaccaagctctggtatgctccaaatcgcaccatcaccgttgatgacaagatgtccctccggctccactaccggatgaggttctatttcaccaattggcatggaaccaacgacaatgagcagtcagtgtggcgtcattctccaaagaagcagaaaaatggctacgagaaaaaaaagattccagatgcaacccctctccttgatgccagctcactggagtatctgtttgctcagggacagtatgatttggtgaaatgcctggctcctattcgagaccccaagaccgagcaggatggacatgatattgagaacgagtgtctagggatggctgtcctggccatctcacactatgccatgatgaagaagatgcagttgccagaactgcccaaggacatcagctacaagcgatatattccagaaacattgaataagtccatcagacagaggaaccttctcaccaggatgcggataaataatgttttcaaggatttcctaaaggaatttaacaacaagaccatttgtgacagcagcgtgtccacgcatgacctgaaggtgaaatacttggctaccttggaaactttgacaaaacattacggtgctgaaatatttgagacttccatgttactgatttcatcagaaaatgagatgaattggtttcattcgaatgacggtggaaacgttctctactacgaagtgatggtgactgggaatcttggaatccagtggaggcataaaccaaatgttgtttctgttgaaaaggaaaaaaataaactgaagcggaaaaaactggaaaataaacacaagaaggatgaggagaaaaacaagatccgggaagagtggaacaatttttcttacttccctgaaatcactcacattgtaataaaggagtctgtggtcagcattaacaagcaggacaacaagaaaatggaactgaagctctcttcccacgaggaggccttgtcctttgtgtccctggtagatggctacttccggctcacagcagatgcccatcattacctctgcaccgacgtggcccccccgttgatcgtccacaacatacagaatggctgtcatggtccaatctgtacagaatacgccatcaataaattgcggcaagaaggaagcgaggaggggatgtacgtgctgaggtggagctgcaccgactttgacaacatcctcatgaccgtcacctgctttgagaagtctgagcaggtgcagggtgcccagaagcagttcaagaactttcagatcgaggtgcagaagggccgctacagtctgcacggttcggaccgcagcttccccagcttgggagacctcatgagccacctcaagaagcagatcctgcgcacggataacatcagcttcatgctaaaacgctgctgccagcccaagccccgagaaatctccaacctgctggtggctactaagaaagcccaggagtggcagcccgtctaccccatgagccagctgagtttcgatcggatcctcaagaaggatctggtgcagggcgagcaccttgggagaggcacgagaacacacatctattctgggaccctgatggattacaaggatgacgaaggaacttctgaagagaagaagataaaagtgatcctcaaagtcttagaccccagccacagggatatttccctggcattcttcgaggcagccagcatgatgagacaggtctcccacaaacacatcgtgtacctctatggcgtctgtgtccgcgacgtggagaatatcatggtggaagagtttgtggaagggggtcctctggatctcttcatgcaccggaaaagcgatgtccttaccacaccatggaaattcaaagttgccaaacagctggccagtgccctgagctacttggaggataaagacctggtccatggaaatgtgtgtactaaaaacctcctcctggcccgtgagggcatcgacagtgagtgtggcccattcatcaagctcagtgaccccggcatccccattacggtgctgtctaggcaagaatgcattgaacgaatcccatggattgctcctgagtgtgttgaggactccaagaacctgagtgtggctgctgacaagtggagctttggaaccacgctctgggaaatctgctacaatggcgagatccccttgaaagacaagacgctgattgagaaagagagattctatgaaagccggtgcaggccagtgacaccatcatgtaaggagctggctgacctcatgacccgctgcatgaactatgaccccaatcagaggcctttcttccgagccatcatgagagacattaataagcttgaagagcagaatccagatattgtttcagaaaaaaaaccagcaactgaagtggaccccacacattttgaaaagcgcttcctaaagaggatccgtgacttgggagagggccactttgggaaggttgagctctgcaggtatgaccccgaaggggacaatacaggggagcaggtggctgttaaatctctgaagcctgagagtggaggtaaccacatagctgatctgaaaaaggaaatcgagatcttaaggaacctctatcatgagaacattgtgaagtacaaaggaatctgcacagaagacggaggaaatggtattaagctcatcatggaatttctgccttcgggaagccttaaggaatatcttccaaagaataagaacaaaataaacctcaaacagcagctaaaatatgccgttcagatttgtaaggggatggactatttgggttctcggcaatacgttcaccgggacttggcagcaagaaatgtccttgttgagagtgaacaccaagtgaaaattggagacttcggtttaaccaaagcaattgaaaccgataaggagtattacaccgtcaaggatgaccgggacagccctgtgttttggtatgctccagaatgtttaatgcaatctaaattttatattgcctctgacgtctggtcttttggagtcactctgcatgagctgctgacttactgtgattcagattctagtcccatggctttgttcctgaaaatgataggcccaacccatggccagatgacagtcacaagacttgtgaatacgttaaaagaaggaaaacgcctgccgtgcccacctaactgtccagatgaggtttatcaacttatgaggaaatgctgggaattccaaccatccaatcggacaagctttcagaaccttattgaaggatttgaagcacttttaaaataagaagcatgaataacatttaaattccacagattatcaagtccttctcctgcaacaaatgcccaagtcattttttaaaaatttctaatgaaagaagtttgtgttctgtccaaaaagtcactgaactcatacttcagtacatatacatgtataaggcacactgtagtgcttaatatgtgtaaggacttcctctttaaatttggtaccagtaacttagtgacacataatgacaaccaaaatatttgaaagcacttaagcactcctccttgtggaaagaatataccaccatttcatctggctagttcaccatcacaactgcattaccaaaaggggatttttgaaaacgaggagttgaccaaaataatatctgaagatgattgcttttccctgctgccagctgatctgaaatgttttgctggcacattaatcatagataaagaaagattgatggacttagccctcaaatttcagtatctatacagtactagaccatgcattcttaaaatattagataccaggtagtatatattgtttctgtacaaaaatgactgtattctctcaccagtaggacttaaactttgtttctccagtggcttagctcctgttcctttgggtgatcactagcacccatttttgagaaagctggttctacatggggggatagctgtggaatagataatttgctgcatgttaattaattctcaagaactaagcctgtgccagtgctttcctaagcagtatacctttaatcagaactcattcccagaacctggatgctattacacatgcttttaagaaacgtcaatgtatatccttttataactctaccactttggggcaagctattccagcactggttttgaatgctgtatgcaaccagtctgaataccacatacgctgcactgttcttagagggtttccatacttaccaccgatctacaagggttgatccctgtttttaccatcaatcatcaccctgtggtgcaacacttgaaagacccggctagaggcactatggacttcaggatccactagacagttttcagtttgcttggaggtagctgggtaatcaaaaatgtttagtcattgattcaatgtgaacgattacggtctttatgaccaagagtctgaaaatctttttgttatgctgtttagtattcgtttgatattgttacttttcacctgttgagcccaaattcaggattggttcagtggcagcaatgaagttgccatttaaatttgttcatagcctacatcaccaaggtctctgtgtcaaacctgtggccactctatatgcactttgtttactctttatacaaataaatatactaaagacttta

SEQ ID NO: 867 - protein, 1154 aa, Homo sapiens
MQYLNIKEDCNAMAFCAKMRSSKKTEVNLEAPEPGVEVIFYLSDREPLRLGSGEYTAEELCIRAAQACRISPLCHNLFALYDENTKLWYAPNRTITVDDKMSLRLHYRMRFYFTNWHGTNDNEQSVWRHSPKKQKNGYEKKKIPDATPLLDASSLEYLFAQGQYDLVKCLAPIRDPKTEQDGHDIENECLGMAVLAISHYAMMKKMQLPELPKDISYKRYIPETLNKSIRQRNLLTRMRINNVFKDFLKEFNNKTICDSSVSTHDLKVKYLATLETLTKHYGAEIFETSMLLISSENEMNWFHSNDGGNVLYYEVMVTGNLGIQWRHKPNVVSVEKEKNKLKRKKLENKHKKDEEKNKIREEWNNFSYFPEITHIVIKESVVSINKQDNKKMELKLSSHEEALSFVSLVDGYFRLTADAHHYLCTDVAPPLIVHNIQNGCHGPICTEYAINKLRQEGSEEGMYVLRWSCTDFDNILMTVTCFEKSEQVQGAQKQFKNFQIEVQKGRYSLHGSDRSFPSLGDLMSHLKKQILRTDNISFMLKRCCQPKPREISNLLVATKKAQEWQPVYPMSQLSFDRILKKDLVQGEHLGRGTRTHIYSGTLMDYKDDEGTSEEKKIKVILKVLDPSHRDISLAFFEAASMMRQVSHKHIVYLYGVCVRDVENIMVEEFVEGGPLDLFMHRKSDVLTTPWKFKVAKQLASALSYLEDKDLVHGNVCTKNLLLAREGIDSECGPFIKLSDPGIPITVLSRQECIERIPWIAPECVEDSKNLSVAADKWSFGTTLWEICYNGEIPLKDKTLIEKERFYESRCRPVTPSCKELADLMTRCMNYDPNQRPFFRAIMRDINKLEEQNPDIVSEKKPATEVDPTHFEKRFLKRIRDLGEGHFGKVELCRYDPEGDNTGEQVAVKSLKPESGGNHIADLKKEIEILRNLYHENIVKYKGICTEDGGNGIKLIMEFLPSGSLKEYLPKNKNKINLKQQLKYAVQICKGMDYLGSRQYVHRDLAARNVLVESEHQVKIGDFGLTKAIETDKEYYTVKDDRDSPVFWYAPECLMQSKFYIASDVWSFGVTLHELLTYCDSDSSPMALFLKMIGPTHGQMTVTRLVNTLKEGKRLPCPPNCPDEVYQLMRKCWEFQPSNRTSFQNLIEGFEALLK

SEQ ID NO: 868 - DNA, 155083 bp, Mus musculus
  misc_feature (1)...(155083): n = A,T,C or G
tgtggggtgtgtgtgtgtgtgtgtgtgtgtgtgtgtgtgtgtgtgtgtgtctgtcctttttgtctgtttccgtcatctaaagatccttcttctgtgaggctgacatgccttgatttctaagatggccgacagatctagacctgaagcagattccaacagagccccacggtggcatagtcatccctacctcctacctcgttgcttaagataatcattaaatattaaataaataatagagttaataactataacatgctgacacagagtagggagtataacatttgacaaaaatgaataatcttgcaagtatttaatgttgcagacatgagcttttgtgggtagtaaagagaccctttcagtctgtcattgccaccttgctggctcctaaagtttgtgtatctactttaattaacgtgaacataaaacttcctccttatattgaccaagatctgctgctgacacccagcaggctagggacggtcagctcttttctctaggttgctgagtctggggatggcaacaggtattctttcagagacaattccatatacatcatgtgaatctgggtaggaagaaatggatagttttatagtgctaaaaaccagttagctttataattttaaaactagctgtagccttacctttagtcccagcacttgggaggcagaggcagggggatctttgtgagttagagagcagcttggtctacatagtgaattctagaacatcaaaggttatatagtgagaccctgtctcaagaaagacacaaacaaacaaacaaacaaacaaacaagcatagttctgtactgaacgcccagcatccttggctctgttcccggggcccatcttgtggttcattcacggcttctcaggctatgcattattcctgtacatttctctactactcatttctcttttcattccctaaacatcttgggaataagactattatgtatgactattaattatacttactagattaattgaaacaaaatcttgctcaaatttttacttatttatttttttctgagacatggtttctctatctagctttggctgacctggaactctccagatcagaactcacagagaccctgctacctctccctccggagaggtgctgggattaaaggtgggagctaccatggcacttagcttttgaaaaaagtcctgggaagaagggtacatattacttattcccttcatttaatatttgaggagataaatcaagagatactacatgacttgccggaggcctcctagcaggtaaatacctaacttaggcatggctatctgtagacgtccccctctgccacatctcccagcacagaaccgacatgttcccacgtactgatggaggggagaagtaagatgagctaccacccaatgatagaaatccatagctcggttttatctggttctgtaaagtgtgatctgatttttttttttccacatgacatcactatcacttgaacacctcaagccacattctctgatggtagtcaggctacaattttagtctgctgctaatgagtggcacacaatgagacagtgtgaacttggccaggagcccttaaacttcctaaaactcagctattttatcatcagcaaaaagagaatgctaattcttatggccttgtagcagtgctaattaatgtttgcctagcatacagagcctcagaaaaggctagttatcatttttatgaatattagtacagatcttacacctcaaacatgggtagtcatggggctgaaaagtccagaaagctgtgagaaagaccataactttgagtcgtctttggggcagctgaatcttctggaacagctaggtcctgtagcaacatcctgctaaccaaaaaaacaaacaaacaaaaacaaaaacaaacaaaaacaaaaacaaaacaacaacaacaaaaaacctataggtaagaaagaagaatgtggcttctaggaactcttggcatcttttactgcatgctgctttttcagagaactggagtttggttcctagaaccatgtcacgactgcctgtaaattccaggggatccaataccagctcctagcctctgtgaacgcccactcccatacccatatatacatttaatacaaacaaaatcttaaaacacatgtactttgagtatctataattgtatttacaatgtaaatacttggacaatcatgagataaaaggctatatgcttttgttgttgtttggtcttaaaggctcttacccccttgatgtctgaagctttatgctaatttatttctgccagtggcgatcaaaatttcttgattcctttctgtgttctgctaggcatttttgtttacaattacggaagtttattctttgacaatttcatacaagtatatactccattctaacagtgttagacattttaatgcttacctacttgatgtgtataaacgatgcttcaggcccttttgttgctttttgtttttggagacaggatctcatgtacctcgggctggctttgaactcctgaccctcctactcgacatcccaaatactgtatataggcatgatgccagtaggcatgcatggccgtgacaaccatggccaccatggtcatttgtctttgaaaaaattgagttcctttgataaatagtagatctaagtatctttccagaaacactggctgctcagatgagcctctgtgaggacttggtaccatccttccctcccttttatgtggtggtttgtctctttcttcttctctctttatagggattctttaaatattctgggttctaatcagttgcttggtttagatttaattgtgtagtatttttgttttcttcgagttctgggatcaaattcaaggcttctccatgaatgggaatatgatcaaactgtgcagagtggaaattaacccttgcattgtatctgtccttcccagagaatgagtttttaatcatacctcaaagttgttaagtgtagaaaagggaccctccagagggtagatgtatttctgtaaccagaaaacttctctggcccttgggagtactctcatcagccctgagttcctctcacaagagatcgcctcaccctgctggtgcctgagatatgctcttcctgggaagacacagctggaaccagctcggtctgtaccagcagatattgttttttaggacaagaagagagcagaacacatgccagttaatcgctagcttggcttcttgtttctaacagtgtgttctttttctcttttaaacacattcgatggaggtaatggttactggaattaaacaagattgcaaatataaaaggagtttaggggctgagcagatggctcatcgaggaaagtgtttactgaataaagaggaagacaatactttagatcctgagcacccatgtaagaactgggtgtgacaggccatatctgtcaccctagctcttgagcacacctgcatgtacatgtatttatcacacacacacacacacacacacacacacacacacacacacacacactcattcatgcatgtacatacaaacataaaatacaagatagttggccctgacaagtagccaccactttgcccgagagacagaagtcacttgactaatggcttcggccccaattccttctcctgacacacacactgtgtacaggtacataactgacggagattctccaaattagcctccagatctgtatcggcagttcctagatgcgcaaataccccacacgactttagagtcaccaagtcagaaactctagaggcagagccctgacgtctgtcctttagcaagccatgaagtaacctcagtacaagctaacattcgtcaaactggcctgcgagtggacaagggctcttgtccagtgtgcacctaagcttcagctcttcatttgccagcttgtggcatgagtaagttaccaggtatttctgggggtcaagctcacagcaatacaagaagatggtaggatgtagccctttctttacagggctgctgtgaatgtcatgaagtagcctgactctgctgctacttgtctgtgcagcttctggcaaattaccttgccttttactctcattgagattgtaacatatatgtagtaatgtgtgccagctaaacagtgcacacatatgtctgtctatctatctatctatctatctatctatctatctatctatctatctatctatctaatctatcaactatatttaagagtatgtgtgtgtgtgtgtgtgtgtgagtgtgtgtgtgtgtatgttaggggaggactttctttcaggcattggctcctcctcccactttgttgagtcgggtttctcttgttgtttctccagaccagcttgccacagagggtctaggagactgtcttgtcactggccttgtaagaatgctcagattaccgatggattctagtgcatctagttttttgtgggtttggagctgtgattctcaacctccctaatgttatgaccctttaatacagttccttgtgttgtagtgacccccacaaccaaaacaattatttccattgctacttcataactgtaattgctactgttatgaatcataatataaagatatggtatgtgagatgtctgatatgtgacccctgtgaaagggtcattcagctaccagtgggtttgtgacccacatgttgagaactgctggtttagggactcaaatgccagtcctcaggcttacactgccagcccttgtttccactgagctctcttcctggcctacactaccttgttttatggtcttcattttatgaataagaaaaaaaatcagagcaaggttgaataatgctttgcagtgacattaactggtaccctaggattcaatcccaggcagcttgaggtgagcacgcttgcattaaagccactgctttggcaaatgagatcttcagcaaatttacacaaatgacagtaaaagttaaccccttggcaagtggtaggcattccacaggttagtttccttcctcttgtctggtagcttggcttcctggtaattctgccttcctcgtagtcacctgcctgcccccttctgtggttcgtctccgagtacacttggttgcacatccccacagctcagcgtgacttttctctctccattttacctctttagctgccatttgggtgctcagagcaaaccaaacagatttagctgggtggagaaagacaagtgtggtacttctgagatgctgtctctccttcatctcagcaggcatgtgactcagaagtggcttctaacaagagagggactgtgcagaactgcagaggggcttggtggcaagtggagttgccagacccattccctagacccagttattgagacagagcgtcacgccatgactggctacttagaatggactttgttacaagtctatttgaagcttggggtcagagacatcagttagtggaaagatccaaggcttcggtctgtttgttcttgttcctaaacgaggcagggtcttgagtctctgtgaggcaggacaagacttctgagagcttgcctggctctggctaaaatggcctgaggatcagagatctaaggttttggtaaatatggtgtcacaagggaatgttaaacccctttccatttaataagaccttcaaatctcattcctcctgattttaagcaagagaaagacgtgttacccatgtacagtggctcaggcctgtagttccagtgtttaggattctgagatgagaggactgctgaatctggggccccaccttttttgttgttgttgttttgtttttttgttttttgagacagggtttctctgtgtagccctggctgtcctggaactcactctgtagaccaggctggcctcgaactcggaagtccacctacctttgcctcccaagtactggaatctgggggcccatctttaaaaagggggaggagataaaacctgcacttgggtggctcaaccagaggattgcaagtttgaggttagcctgggaatatagtaagactttgtctcaaaaatgtaataaactggggtgtgtcacatagctcagcggatgaaggcccttgctgtgtaagcctaacctcttgagttccattcctggaatcatgagaagatggatgccaagaatagactccacagaattgtgctcttacctccacgtgatcaagtgtcatggcatgtgtgagttctctgtttgtctgtctgtctttcatgcatgttctctctctcctgcacatgataaataaaatataaaaacaaacaaaggactagttaagggaaggtagagttagacacatgtaagaaatgttaacaaaatgtgcatggttaagaggctcactgcacagtttactcaacttctttgcatgcttgcaaccattccaaaacagtgttaggtaacatgtaggtatttgcagagatggtcacacttttaaaaaaaagttccttcctttgacatatgaatggaagccctcctcccaccctctactacttcatatcttgtactccttccctgaaacaaattcagcgtgagtgagttcagccagccagtgggcaactcctctttataccacaggctttgtctccttcctggggtataatcctcacaataaccctacaaactaattactattttccatagtttaatgaggaaagccgaggctcagagggctgactcaggtaatcatattaaccttatagcactgagggtgaccttccttcctggtattgtgccatactctttgtgtttgaagccactgggcctcacccagccttaggagatggtcctattattacctttatcctacacagttggagcagaaacaagaatgcgtcccaactttctctagggatcagtaaatggcacagctcgtatttggacccagtctattctgcctcagagcccttttgccccctctattcaaagccagtcctggcatctgtttgcctgatttggtaactggaggccgcaggctcctgaagatagaacacattgtccaccactgtggaatattattgaatgaaagggcggggcagggggtctgcagcatctcagccccccgaagtgctccttctgggcacggtttgatttagtccttggaggaggagatacccagttttttgtttttggtttggtttgtttgttttttgtttttgtatgggcctgaggctcataaaatgaatgttaaggagctataacaaacccatttatgataatcagccttttggcactattaacaaagtgtgtgagataacttacagagggaaaagattttttaaaagtattttgacatttattacaaatgaatgcctgtgtgtaggtgaaactcagaggacgaatttggggagttggctctcaccttccatcaggtgggttccaagcttgaactccagttgtatggtttggcattaagtgtccttgcctctgagccatttcactggcttgggaaatgctttgttttcacttctgttcctaatagggttgacacattgctttgggtcagtggtgagcagcatattattgggggatcacacagcaaagcaaaaccagttaatcttgtggccagaaccgtgaaaggggaaggggttacagtcccacaatctcctttgagactatattctcagtggccgaaagacccccaagggtaccctatctcttaaaagatttaccatcccccacacagccctgctttggaaccaagccttaatctctggggcatctagaaggcaggcaagatctcggcctttctcattgactctcccctcgctggcccccagcttctaatgaacagaaaggtgttatgcattgctaaggagtaatgggacccaaaaccaaatgcttaaacatttccaaattctcagggagtcttcagatttaaatggctaaaaatccactcgggaacctctagtgtccaaggcaacttcctctttgtggccatacttggctcaaggctgcagcaatgagcagatgaacacttaaaattgtcaccttataagtgtgcccaagcggctagcctcacagtgacagagtgcttggtttaccaagttctgcatctcttctctcccttcatcttcccagcagcctggtacacactcagggcaggcgatgcgctcctgtttgtaggcggggaaatgattcttgagaggttggccccacaccactcagtttgtaatggcagaggggtctttagcatcttacccaccacatcatcttctgtgtcaatactgtatttaaatagcaagttccaggggtgaaagcaacaaaggatttccttctgttggttttcttgcaacatgggttctgtacttcattagcgttaatctctctggagatcagtttttccagtctgtcatggaaacaaacaaatcaaccaatcagccactagcgaggggaaatctagtagagaatgttgtgagggtttagaaatgaagaaaattggggctggagagatggatcagtggctaagagcactgactgctccttccagaggtttttgagttcaactcccagcaactacatggtggctcacaaccatctataatgggatctgatgccctcttctggtgtgcctgaagacagctacagtgtactcatatacataaaataaatgaataaatcttaaaaaaagaaatgaaaaaattatttttatttttcaaaactgattctgatgtatatgggtgttgtgcttgaatatatatctgtgtatcatgtgcatgtctggtgcccatggaagccagaagagggcactagatccccagggattggaattatagacagttgtaaactgtggagtggtagctgggaatccaacctgaatcctcaggaagagcagctagtactcttaaccactgagccacctttctagcccctttcttttatttttaaagatttatttacttaaaaattaagacttaaatttacataaaaagttattgatttttgtgtacatgtgtcttgtggtgtatgtatagagggcggagaacttttttttttttttttttttttttgagtggttctctctgctatgtaggtaccagggattgagttcaggtgacagagtcaggcttggtggcaagcacctttacatagtgagccatctcactagacctgaaaaagcagtttacagtcttttttctttgagggcgggcaggagataaagagctgcaaggcaatgccagggccaagctttgaatatgctaggcaagtattgtaccatcagccacgctccagccccaatgttaagtaaggatgtttagaagactatgataatgccgacccattttcagtaagttagatgtcatctcatttggccaccgtgtctaaaaatggcacttgttagttacctcattgtcatgtgccgttattcctcacagtgtttgccgcccattatggtttcatattgcttgtctgaatgctctcacctaaaggtaaaaattgttatgagggcagggacttgtctgctcttatcctctggagtcccaacaggtaaaacaatacctgccaaaaatgactgtttgttgagtaagtgacagaggaagggtgtgatgtacccgggttacagaatgatacaaaattctgtgcgaaaagaatgactaaaaggtttgctggaaacttccttgcctctcagtagaggggtctactgatctggcttcctcatacctggtcctggctgagtcactgacacaggctggtgtgcaaagcttccttgcttatcagcttatatcttggtgaagcagcattaggaacctatgtcctcgaagtagacatgggccactgtagggcacccactgcctctgtgtggtgccattgagaacagagctgggggtccgttcctgtacactgctccatctgcaggatgtagagctgtgcctgacccacccagagtttttgttgagtaaatgaagcagcgaagagtacaaagaggacgctcagggttcttcatccttcccaaagtcacttgaaaataagtccagaccacagcgcagcccttcccagagcaacgtgaaccaagtctctctggaagcaagaagaaactaagcagttggatcctcactccaaggaaggaagaagggcaaacctaggctccagatccggttccatgccatgttttggaagtcgtgtttacgtctgccttcatcctcatcccttccgcttcagcataagcaaaattataaccctgcacgctgacttgtatgctattatcatagcctggctgctcctgcgttgagggacttcgcccccgggatcgctgactgtctgtgaatgacaaatccaaagtcaggggttgcagagtcagccggacttgcctgctctcgtgcagcagcgggagaaaacagaatgaaagattctgaaaataaaggtaaggggctgacatcagaggggcggctggtagacgcttgggggagatgtcacgacgtgaatgtgcttagtttgtgctgatggctggctgctttgattactgatgtatcttcgtaatttttagttatgtaatatatgtcctctttaagtgactgttttctaaataccatgtcattcagttttccattttttttgcgttactaaaaatatatttttattctttatttaatcttggccaagtacacatatctcacagttttctttataatcgcttccagaattttgatacttttattttgggagtgtttataattgttaattattaaaatgtacggtttcagccaattattggaatagctggagatcgtggttcttaaaacagttcgggttttctagagaggcattgactgagaatatccagatgaacgttcgttcatcttctttgggagggctcagcagggagtcgtagtcgctgaccttcagaactgtttaccttgcacagggatgttctgttgcaaactccccctgctccccgccccccacccctcactgcctttaaaaaaagaaaaaaaaaaaaaaacccaccagcatgaattctgttggaggggagggcaaggacagaaacagattgacgtgaaagccccccaaccaaggactctggaggatttaggggttcaccgccggggccctgggaaatttctgccgcagcggggggaggggcaacagcccccagctcgccccagcacacacgtggttcagggtcgcacttctttctgcatccttgattctctagatcctggtgcctgccgaggggccgacatctccgcagcctggagctcaggccgtgcttctccgcagctgctcagtttgctcgcgccgccgaagcttcctggggccttgtggtttccccttggcagggcaggtgcgcaggtgcaggccggtggtgccaggtgaccgctcgtcccagcccctgcctgcctgcatgccccgtagcaggtgtggccttccccacaggagtctgacctctggttgttaaaagatttctacctggtgatggacagcggtatatgcacccataaacacccgagcaaagagtgatcatgagtcttttacagtgtgatggatgccaggggcgaggctggctttccagtctaccagaagcaacgcagtgtcttaatggatccggggtttctctgatcgcgccttaaaagtgactgggtggggcctggggttgttggcaccatcagctcagaggctttggacccttcacattcacgcattgagccatgtggttttggtgcttaaattttaattaagcagttccagggaggaagaaacagctgtgtgaggccgggctgaaagcatagaggacagttctcttctgtctcctagccagccgccactcatggacaaataactcctatgtggccaaactattcaaaatcagtttccgaagagggcacttccttgctgtttgcaggggctagagaaagggttaatgcagaaagaggggaaaaatgcctatttgtcaagtcatgctaggccatggacatggcttagaaacaattaaagctgtctgaatcacaggctcaggcccggctcatttaagcttcaggtctactgacctttttaatgggagctggtatttggaatttttgtattgctctgtgttggaaagagccgcgggctgtcaatccaaacaggcaggttctgacttgttcagccatctctccttagaaaccgggacaagactgttgattttcttgggtctcagtttatctcctgaatggcgtgatattagatgacattaatgctttttcagatcgtgagggatttgggtatatcgggagcaacatttcagacaggcacagtagaaaaaagttcatcttagaaactattgaacgtatgtgagtaacttgtttttgaagctgttggtatgtgcagacatgtgggctgtattctgttatcaagactatgttctttgagtcctaaccaaaacacaccgaagaatgatgaaacaagccataacaggtttcattttgaaagagtctgtgaaatgcaagcatacatgtgcatccaaccatatatgtgctattgaaagaaagatgaagtcagcaattgccctctgatttacaaagatgtctgagaatccaaacaggtcacgagttaatgtatatctagggtcccctgagaggctttcaggccaatttcttgctgtgctgggagatgtgtctatgttgaggagtggataagagtgtgtgtgatatcatgtatgaggtgcatgtatgtgcacacagacacgagaatgcattcagagagagtatgaacacgtccaccagaccaggagagctatttttgggaagcaaagcaccagttgttgacctgaatatgaaataaatgtacaaaaaaaaaaaaaaaaaaaagctgaaaaggactgctaaaaaaaattaccaaaatggagggattttttttggaagtcatttcttgtaacggctaacagaggaaccaggtgaaattgcaagaggtgatggaggtggttggcgcttagtatgttggcaaagagaacttgaacttgaatgagctactgtctcacgactggtgttcaggaaatggtggattgtggtttaataactgccttcctttctgtaacctgttctcagtacatctcggacagcccagtgaggttattaactatgagaggcaatttttatctcttatgcctcttttataactttatctcaaaatgctttgcaaataagaaaaaggcctgtgtgttagacaattaagatacttgaatgagttaactaaatattggcgagcatggctacaagttttagtaataaacgtcctagagcctattttatgatcaacgacggtgtgacaagttgtctgtcaggttgattatgtattgttccagtagtacaggggaatacttcctgtgcagtgtaagagtagtggaattgtattcaaacccagactgttcaccccagaaaccacttctcaggtaggcagacaactcacgccataaaattcgctttaaaataaaattgcatgggggctggagagatgacttagcagttaaatgcatctgttgttctcgtagaggatgtgcggtcagttctcagcacccacgtcagacaggccaaactgtctataactccagctctaggggacctgatgctccccccgacctcttcagtcaccatacatccccacatgtttacataaataaataataactataatataaagattaaaattgcctatattaatattagaattaatttatcttgtataaaacagggaaatatgaaccccagaaaataaaataacgacttttgactaattttctagtttgtttgaaacatagacacagtagagtttgtgaattaccaataggtcatagagatatgaaagaacaagagaggagaatttgaaaaattattattattattattattgcaaataaaaggcagagaaggggttggggaatctagtccagtggtagagcacttggctagcaagtacaaggcccgggcttcagtcctcagctcggggagggcatgggggggggggggagactaacaaaaagtcagagaaaatatttctcttccagtgcttctgtattttgagagattttatttactatttacaaacatgacattctgtgagcagatgagggatgtggctaatgtttggatgtgtgagagcaggggtttgagcatggtctgtgttatagggacctgcatgattttgctagaagacactgcaaaatgagatgagttgaacaaggtcagacggagacttttaggcctcacatattaaatctggcttctattcttcagtgaaaaaaaaaataggtgaaaaaaatgttagtttttgtttcccttaaccagcatgactcctttgatatcttcggagcaaacacatatttcaaggtgatttttttgtttttgtttttttttttttttgtcatggctgcttttgcctggttgggttggtgagatggtatttttgcaggaaagatctgtaaatatcatgtgatttctcaggcaggggtctagggcttgctcatgccagtggttatcaatggaaactgaatctgcactggaaacctgcaagtcagctttcggtttggtagtgttcaccggcagaaagaagctagagctgtttgagttagcttgtgtgacctgtaactttgaaatgtttttgttgaagaggtgagactctttatagtttttccagcctagaatgtatgttggtcttatatacatagttaaatgtccaggactaactggatgtgatgatgcacacctttaatcctagtactcaagagacagaggcaggcagagctctaagttttaagtcagcctgatctacaaagtgagttctagaatagccaaaactactcagagaaaccttgtcttgaaaatacttccccctccccaaaattcccaggattaaaaagtgctatcaaatctaagaaagtttataacataattttgttcccttcaaaaacttatctaatgcaatattggtattttgcaaggtaatgggaagaagttgcaacacaatttatccttcttattcagtctacatacagatgcaaatacctcgctacaatgtaacatggttctgcctgagtgtttctacattacaataaatatattttattattaatgttatatttaatttctgcttggtgtatgtacttggttagctacattataacatagttctgtctgagtgctcacacactgcaatgcatatactttcttattaatgtcttatttaatttttgcattatgcctatgcatgtgtggatatgtggaggccagcacaggttgtccggtggtttcctccattgctcgcagccttcctgctctgagctagggtttctcactgaaccagaagctcaacatttttgctaagttggctggctagtgagctctcaagatcttattgtctccagcccccgcaccccccccccaaccagtgccgaggttataggcacttacaattatgcccagcttttttacatgggtcctggggatttgaactcaggtcctcacgcttgcagagcaagtactcttactcaccaagcctaagtattttccagtccccctgaatattttggtttctttttgtgcagtgctggaaagcaagcccatgctatctgctaagcatgcgaagcaaacactgctatctgcacttctcattcttttaaagacttatttatttattgtatgtataggagtgctctagctgcatgtatacctgcatgccagaagagggagacatcagatcacattatagatggttgtgagtcactatgtcacagggatttgaactcaggacctctggaagaacagtcaatgctcttaaccacagagccatctcgccaacccacacttctcattcttgaccttcctatttcagagaggtttgaatcaatgttaaaaactttggaacaatatatattcaatcctgtaattttggtgccttttaaaaaaagatggagacactgtataactgtttgtaattgaaattgagctgagcaaaacataccctatttttctttttctttcacctttgagataaggtcttatgatgtgtgcagcttacactggccttgaacttggtttgtccctggctggtcttagacatgattctcttagctcagtctcctgagtgctgaggttatgagcgaatgccatcatgtctagcagagacacggggacatcatggatgtaaacctgctggaaagtgatgccatggggttattgattctctttgccactgaagctggcacttggaatttctgtttttgagttgttcgttaggatacacaaatgtgatgcatttttagatcttggttttattttgatgatcttgctaaatgcacttaataatttgaatagtttttagatttgaaagaatttcctacattgacagttttctctaattaagacacttttatttccttgtttccaattcttacacatttttaaccttctcttacttaagcattgactaggatgtctcttaaaatgatgaaagaggggccggcaccacggctcagtataaaggcccttgctgccaagcttgatggcctggtttgactcttgggacccacgtgatagaaggagagaacacattttcatttgaagctgtaattctccctttgagcctggctgttatagatgctgcaagtattgtgtcataattaattttttataaactatttaataacttccattacatcttttttttttaatccagagggtcatatagaagtgcacttcattaccaggcaaccgagtggttctgtctagttatttctttgctattgacttctagtttctttctactgtagtaagaggaaggactgtggatatagttctttttagaaaaaaaatttgagttttttctactgtatatatggttgtcttacatatttttttagtgtgtatatactttgtatgcactttaaaataatatgcacactaacgttgcctagtttagctatgttggttatttcatttttttcttaaaatgcaaagatttatttttatgtatgtgtatgtatctgtgtgagtgaatgccatgtgtgtccaggtgcccctggagacaaagtgtccattagatctcctggagctggacttacagggttgtgagctgatgtgggtactgggaactgcacttgacctttggaagggcaggatgctcttttaactctgagccacctttgctcacttctttgagatagagtcttgttctgtagcccaggctaggctagaacccactgtgtagcccaggctgtccttggactcatagcagtcgtcgtgtctcagcttccccagttgggattgccggcatgagacgccttggcctgcctgccttggcatttctctctggtgttgccataaagcctggcccagaacttgctgtatagcccaagctggccttgaagtgatatcagttcttctgcctctgtctcctggttgttaggatcacagttgggagctgacattctcatcttgtctttgccttttgaaggtagtgccactgggtgtgtgtaattctgggagaggacaagaatggcacgtattgtggaggctgagctgggagagaagccagaagttcaaaactggcctgggaaacagtgagaccctgagtcaaaacaacacccacactcacacaacccccaaaccaaaccaccaacaaatcctaagctggcagatgtcttaaatttttatacatataaaatatataaaatgtatatatgtatataagtttataatatgtataaaatataaaaatacataaaattgagggttgttttttgtttttttgtttttttgttttttttttttttttctgttttgttttttccagacagggtttctctgtgtagccctggctgtcctggaactcactctgtagaccaggctggcctcgaactccgaaatccacccgcctctgcctctcaagtgctgggattaaaggcgttcgccaacactgccttgcaaaattgaatttttattggcacactgacattatacatagcattagggctccaagggtttatgatcaagctagaagttgtcgtatagactatatccacaaatctttgccagcacccaacgtgcatttttcgggtttcctattttcagtgctgtgtgttatgttaactggaccctggagcttcctctcatgtctggtcatttacttgggtcattctttgagcatttgtgcacctaactcctttcagcacaaatacatgttccggtggctcttgaatcaccaggagagtaagtcagcctactcacgtgacttagagctgaaaggcggtgatcgatggtatgcggtcgtggagaccgcggaaagccttttcatgttttctattaaaattaggccaagaaacaaactggcacttcctgtcagtctcttttgatgtgcgtccctacttcacttcgagtagggaaaatgtgccacggagggaccctcgggtgccacagtgtgtaagtgcggtcagtttgtggacgtacattgagctgatcctgtgttgtgttcacttttcagtacatatgttacactcctgataaaaattataaaagtgggccctttgatatgaaatgtctccccccgcccccaatattgaggtaggtttcactctgtagccctgactggcctagaactcagatatgtttaccggtgctgtgattgtgaaactgagccatcattcctgatgatgtcaagcattctagaaaagcgccagggacaaggaaagcttgaggacggctgatccaggcgagccttgtcgtatgaacgagattactagggagtaacggaacccgggaactgcgcatgtctcggagcccacggtcaggccttctgattctcactctttatacttttaaattcgctgatcagagagtgggggaccagaggatgttctcaaattcgtaaagcatccgcatgagtcagcaccttcctcctttttgcggttccatcttgtcctcattctcttcccaggcatttaaaaacagatacttttatctcaaactgcacctttgaggccttttaaaaattacccccttagaatcatttgatctctcacacacatacgcagtcgagagagagagagagagagagagagagagagagagagagagagagagagagagagagggctttgtgcctgtgaaatctgttcctctctgggccatttttagtatggggctgcattgtttaaatttagaagccttttccaagttgagggggtggtggtagtttgcagaaattgaacccggctatgactcctgctgctgcaagataaatgggaaggaaaatctgggaactggttttaggagagggccaagaaagggacttaggaacttgccttaatgtcacaaaagtagtgtggcactggcctttaatccctgtacccaggaagcaggtgcagggggagctgagttagaggcaagaggccagcctggactacgtgacaggtttcaggaaaaccagggctacacagagacatgctgtcttacaacaaaccctgttgcctgttgagaatatagttacagtatcttttttgcttggaagcccagactttaaaattaaaacataaatatttaaacattaaccaattataaataattactaaaatgttagcattcaacattgttagtattaatattaacgtcaagatactaaaatatagttatgtatatgcacacatatgtaggcatatccatataccaccttctgttaactttcagtcactgtgacaagatagctgagaacaatcaccgaatgagaggagagattattttggcttacagttgtagagatggcagtccttggccttattgttttggggctttgttgacacagcgtatcatgatgggaccatgttgtggattaagcctagtaacctcaagaggggggggggctcatgcgcatgagagagagggggannnnnnnnnnnnnnnnnnnncatacaccacaagacacatgtactcaaaaatcaataactttttatgtaaatttaagtcttaatttttaagtaaataaatctttaaaaataaaagaaaggggctagaaaggtggctcagtggttaagagtactagctgctcttcctgaggagggggagattttcttcaagggcatgcctcagttgtccaactttcttctactaagcctttcttgcaatggctttaccacctccctaggctcttagcatatagaactttgggtcaggtttaatatccaaaccatgacatatctagagtacagtagcatgtgcatacgtgagcatgcgcgcgcgcgtgcacacacacacacacacacacacatacacacgaggcagtgaggttccaggaaagtaaaggccttttctacttgtggttttctccctcctgtggccctcccttcttttctttcctctttccccatcctacacctgaaagcatggactcagagcctaagatgtgttgaagctttacgtaacaattgaaaatgtagaaggcatgcaagagaaaatgcagcaggccctgggagaaggttgtaggctagacctggagtcagagagccctgaagaggatgccactcctaaacagaggatgaccttgagccaggctgacagggaggagggggatatggttcaagcagaaagaacagcatatgggaaacacccaatctagcctgataactaccaatccaagctgaacatgcctgtatgtgagtgtgtgtgtgtgtgtgtgtgtgtgtgtgtgtgtgtgtgtgagagagagagagagagagagagagagagagagagagagagagagagaggggttgtctcactatggagttcagactggccttgctcttgaggtggttctcctgcttcagcctcttgaccgctcttggcagttcattcatttattttttaagtttagaagtgtttttatttattaatgttgcacttgtatgtaggtacatgggtacctgtatgccacgtcaagtgtaggaaggtcagaaaggtaggtctcagtgatggagctcatgagattttacccactgagccatctcgctggccgcattctccttgcttgtgacattgtcttcctattagaaatgagaaatagaacagagtaggtaaaagcatacattctccttataggaatttgtgaaaatccagctaagtacagagaaaacctgcacagccgttctcaacaatctcgttccttggagcgatggctgcacaggtcccagcagtcctttctgtcactgctcctgtgcccttccttctctgtaattgtattctttcttctcttaaccctgcttcccattttctacatctttagtgattctaaaattgctgtatactcacagcatctcaccgtgattgctaggtcttcagttgtgaggagatttataaacctatatagactatcttctgaagtctaacaagatactgtcttgagttaaggagataattcaaatccctggtaaatgagacagtgaacagggcaagcgggccagctttcttcccctactctcttctgcctctcccttccattcccttccctctctctttttgtgacattcctttttgctttgttcagtgggtgaaagggttatttttggtctttaagaaaatgaagtaggtaggcagagagccatgcattggcctggaagtgagaaagcctgaatttctgcttattctctgaccactgattcagtcattccatagtctgctctgacttttctcaccggtaaacatgggaggagtaggttttataacagatgttttcacactgggtttgtgtgagttttagggttgtgtggaggtgctcttgaatacttgtgtctcatggatgaggccaagcactccctagcactcacgaagcctgtgtttgattcagcacttaaaaagaaaagaaattagatgataaaagaaaaattagatttgaaattttatgaatgaaatacaattatacttttgaaaattgagatagacttcagaggccacaaaatatacccttatgagtctgccttatgaggtatgcccaatctggacattttgcataagtgtaacttatacaatataaacttcatatctggttgcttttatttaatgtaaaagtttacaatttcacccatattgtagcatatgtaagatgcatcttgattttcttttcgatacgtgtgcatggtcttgttttgaggcagagtcttgctatgtagctctcaaatcaaatttgctatcctaccgcttcagcccctcagagctggcatttcaggcataagcctccatacccagtgtcctttattaatttttatttaatcattttaggaaaacatttcctatgttcagataaaaaaattgaccagcctattagacagtgccaccgtagcgatgagctctgtgtccattcagatgtaaaccaattttggcttcttctatttttaagcagaatgctgtgtttagtgcacagggaagcttttaaagctcccgttgccttaaagcctggaaaccaacaccctgatcagccagtctcatgtccctcctctggatctacggtctctagagtcggtcttccttggatgacagaagtggtggtgagagacttatgctgggctgacaggtgaccagaagagatggaaggtgaactggtgagctttatctgtctttggggcaaagctccttgcttttatatccctagtatccccaagggggtatgaggaaggcagctgcggttataggccatagactggtggaacatgtggatgctgccttctccagttcctaagagacagaaaggggttcttgtcagagtcagactccacaggtgatacaaactctttgaggtcagtttgcctcatccagattacatccctgttgtttcttatggaacctagcatgcatgagctgttccatgagtatctcttaaataaccagtgagcagtttattgtactgttgacttaaaaaaggaaaggaaaacaaaacctgcccagctcgcatcatgatgcgtacctgtatcacctgagcaggagactggtgagttcaagcctgcttggttccacagctaaaagacaaacataaacagatgaaaaccaccaccaccaccaccaacaagaaatcaacaaattatatagttgccagatatttcagaaaagcacagtgaagtcttgtgcatacttcctgagtataaaactttatttatggggctggaaacatggctcagaggttaagagcactgactgctcttccagaggttctgagttcaattcccagcaaccacctggtggctcacaaccatctgtaatggaatcccatgctctcttctggtgtgtctgaagacagctacagtactcatcatatacatcaaataaataaataaaatctaaaaaaaggaaatgcatgaaaaaacaatttgtttgttagtttgtttacatgtgtgtgcatacatgcacttgaaagtgtgcaggtctaaagttgatgtcagatgtcttgtttgattgctctccaattctttcctgaggcaggatctcttgctgaacccagaacgcccgatgtggatagcagaggtagccagcctgctctctggctctcctgtctctgccttctacatggggtatcatagacggcccctgtgcctgcctaggttttacttgggttcttgggatctgggctctcctccttatgcctgcacagcagctatcacctaggctccattcacctcccatgcctctctggtacagcaccaaaactaagaacctgacacttgcttatcatcgagctgacttaggttgcatgaattacacatgaactcacttgtgtgttcatatgtatacctttgtacagtttcttttagcatacctgtgatcttgaatggccactactgtactcaacagtcaattaaatcatgactatagacttccttttgttataccttcatagcagccatccttttcccttaatatctgatccttcaattaatttcttcttcatctttgtaattatttccagaatgaagaatttccatcatgaagtatgtttgacttttttttttttaacttagcttgatttcctcaaggataatagaggtggtgtggaccaatacttccttccttttcctgactattagtctgtggtatgcacaggccacagcttgtttcttcagacttgaaagatacaagagttgtttccaggtcctgtctgtggggagaagagctgctatgaatatctgtataaaacttcctgtgtgaaactaggatttcatttctacctgacaaagagcttaagactgtccttgctgaacaatctggtaaagacattcttttactttttaaattttttttaaaaaagaattatttatgtattttatgtataagtacactgcagctgtcttcagacacaccagaagagggcatcagatcccattacagatggctgtgagccaccatgtggttgctgggtattgaactcaggccctctgacagaggcgtcagtgctcctaactgctgagccatctctccagtccctgcttcttttaatttttaaaaggaattgccaagctgttgtccacaaagtgtctaccatttcacactcaacagaactgcacaaatgttttcacacacttgtgagtgtgtgccattataactatgctttatctagctgttatgatagatgtggagagatacatagattccttcttctatgtttctccttccaccaaaaagaccacatgggttttgagatcagctttccaattctcagcaaccatctcctatgattttcaaactttttcctagctctgtgacctggcttacatttcttccctccccagcctgaatcccagagtctttcccagtactttccttattcctggggaaagtcacagagctgaccgagttcctgacagaatctcaactgctagcatctcaactcttgtacactcctttcttttaccttggtgactctcttccatttttggaaagtactgctccaaatgtgttgcaagctcttctcttagatgtcctttccacccgtgagcaagacccagacggttcagcttaaatctcagcaccttcgcaccagggccttctgcatcttccacctcatctcaagtccttctctttcgtggaagggctgactgcttgtggtcattttggcctctggaatagcagaaatcccagttatctagaccagggatcattttgttcttctcttttgatcacttatagtatctatcacttcctaggattaaaatggccatgggttctgtcctgcttgataaatgcagaacaccaggagagaaagaactggaagaatgtgcggtttttgttgtaactctattgaggacgcctttgacttaaaatgttgcagatgcagagcaggttaatgtattgaagaaacaaagttgcttcctgttgccattagctgactgcgtgtactctgctgaatgctcagcctatggggatggttgcttggcactggcagcttgcctggatgtagaatcatggagatgcaccatgtgaaggcattgcaagaaagatacaagacccacaagtaatacaaagagttccctcctatggatggggtccaggctgagtaaaaccgagaaagcaagttgagcacaaactttcatctctctgcgtttcctgactgtgagtgcattgtggcccgctgcctcgggctcctgctgccaggccttccctgcttggtgaactcgattcccaaactaggggccaaaataaaccatctccccctattgcttttgttggcattttgtcaccctagtgagaccagaaactaatgcatgtgtggtttcacattaaaaccaaagtggtaatccccagaggggcattggcttaagcatatacatgtgcctgtgttgcattaagaaaaagaagaggggctggagagatggctcaggggttaagagcactgactgctctatcagaggtcctgagttcgattcccagcaaccacatggtggctcacaaccatctgtaatgagattttatgccctctttgatgtgactgaagacagttacagggtgcttatatataataaagaaatcttaaaaaaaaaaaaaaagaaagaaagaaagagaagagaaaaaacatttccccaggagtgatttaaccaagagtgagcccagattcaaatcctccctgtgctgtctgccatctcccacttgttgtaggagtctgattctatgcctgcctgagtgccactgccttgtctctccctgtgtctgtgtctctcacaaagagctttgctctgtatttattaaacatcacagagtcacatgagggaaggaatgagaggtagtttacagaaatctttaatagaattttacaggggctggaaccttcctggctctaccccaccccccactgcccccagtttacccagacaacaagctgtactacaaacaccactgcacacagacttatcaacctatatccatggcacgtacaacctttatggtggatatttgttttataaggttgtttttaatctgtttactgtttctagtgtttattatcataatacacacacacacacacacacacacacacacacacacacacactcattactcatagggcagaacatggaagagtatataatttaagattaaagctttgcattagcttaggttgtaaaagttgattacatgggaaacccaagacaagtaaggttggctgttacattgttctcgtaaaggcagattaaatgaacaggctaagtacacagtaggctaacaatcttcagtcataaataaccccaaggtgtgttattaactctgattgtgaggtccagcaaaagttctaatctcttagactgttggaggtattcttataataatgtattgccacacaggtattagtatattcatgtggatggaggcatggaagataggtgcagagagataacatgctcaaagacagacagctaacaggtggttctaatcctctgttccccaaaggcttatgacttgtagacttggtccccatctgatggtgtttttgcagatggtggaatcattcggacgagaaacctagtagaaggtggtcattggcaatgtgatcctgaagggaatgtgggagccctggcccatcttttctttcttcttccaagttggtatgacatgaagcttgcttgaccaatgccccctaccactgcaggctccacagcaatagaactgactggccgagaacggaaccatctaacctgtgagccaaagctcagcttttcttctttctaagttgattagctacggtattttagtcacagtaacagggttgcatccaggatgccagcatgtttcttcgatcccacaacgtatttatttgactttgctgagacattgtagaatgttcagggtggcttcaaattagtaaccctcttgccctggcttcgggagtgctgagattgctaggtgccagcatgctagtcacaacaatgctgtttatgctgttttgtcgtaccataagaatcaattcccgtgtgtatgttatagcttaaagttattatctttaaataacttcaggcttgtatggagcacccaagccagagacgggaggaggctggaagagcaatagggatgagacaatgagcgaagggagtccagggggctgtagtaggtgctgctcagcctgatatagcagtgcacttaagattagattcttacattaatagaggtaccagaaaaatctcactaaaagaaattaaaagtccattaaaacaatgcagacaaacgagctagtacaatataaagacatggaagagaggatggatttatagatagagtcaagacctacagtcctatgagtcactgcgattgtgagtgaaatactctgatagtgagttatggcttctacccccgtcttttagaaagcctctccagtgcctcttaaactgtaatttttattcctgattacagcatgtttctcacatctttttatcagtctttaggggaataagtatttacttatttatctaggtactcattttatggtgcaaggatagaatcagaggtcctgctcttgctggacaagtagggtaccactaagctacatcccaggtctgggcctgttttgttaggcttcaagagaccaactgtgaatcaccaagttcctacacacttgcctacatctgctttgctgcctattctctgtgagggagaatgtggaacaccctaggtagagttgctggagggtttggggcttagtgttttgagatgatcatttatcccagtgtaaaagccctgcgtgattccctgttgttctagaaacatttactctcctgctgagcagacacctgcgcacttcaggacctgaagagaatgtgcgggtctcaccagttctttctttcttaaaaaaaaaaaaaattagataatttaaaaaaatgtattcactttacatcccactcaccacctcctccccgccatcccctcccacagcccttctaacactttcccttctcctgagcaggtgggaacctcctgggtatctcccctccctggtgcttcaagtctctgtgaggctaggcactttctctgccactgaggctagacaaggcagcccagctagaagaacatatcccatggacagggcaacagcttttgggatagcccctgctccaatttgttcaggacccatatgaaaaccaagctgtacatctgttacatgtgtgcagggaggcctaggtccagcctgtgtatgttctttcagttttctgagagccccaagggtgcaggttagttgattctgttggtcttcctgtggagttcccatcccttaggggctggaatccttccttctcttcttccgtaagtgtcccccaggctctactcactgtttggctggatcttaccatttcttaagtagacctaggcaatcctagttcctgagtttagtcttgctttcacaactcaccacatagagcagtgattctcaaatcttcccaatgctgtgactctgaagtacattctcatgtgcacacacacacacaataaataaaagcaataattgttttcaaattttgaaacaacctaatcttcctagataagtcagtaggtggttcatgggtggcaatcctggaacccatgtgacggtagaaggaggaattgactccacaaagctgttgtttgccttccacttgtgccttttgacacggatgtccacacagacatcatgcatatatatatattacagacaaacagacacacacaggcataccttaaaaataattaaccattgcaagcctatctcttcatcaactttacacacaagcccatctccttaaaccacaacatttcacccttggctcccaaaggctcgtgtctatctcttaatgcaaagagcattcagtccatctccaagaatccccatagcaacagttctaatattgttctaaagttcatggccaaagtttcctaagatttaaggtaaactcttagctgtgagctcctgtaaaataaaaagaaaactgcatactttccttatctggtggcacaggataagcattccatctcaaggggaataggcggtggtccagaaagatgtgatggggccaaagcaagatccaggtgcatcaagatcgacataaatcatggagctccttgtctggcatttggcaaagaatgcatcatgtggtgatacaagctcccactgcttaggcagacccatctctatggccttcctggccacgcccacatgatttattttgtgtgcgttctctgcttattgccttttttttctgttttagcagatgtttcaatttgctggcattgcttcccatgttctcttgttctcttatcatgtttttgcctccatactcacagtttcttacattgccctctcagaggcggcctataggctgccatgtataacttgtccccaggtcttctttgaatctatgtggaaggaatcattactctgtagtttttgtgttctgcacacttgcaaaggtaacaccatgtggaagatgccaccacacacagttgatgtctgtgcgcctatattgcagagcagtaaaatgaatcctgaagaaacaattttctagtcaggctggtgcaagcagtatgactctaaggtactctgtgttccgcggaaagaatttcacaccctagagtttgttgtgagtgggttctggccagttcttgaaatacacacacacacacacacacacacacacacacacacacacatttttctgatgctaatgacttcttttaaatgaacctaaaacctttagaaaccatacctttctttgctctatttgcactggcttttataatcaaactgagagtttctcaagtctttcctactttgcattttgcttcctgttctcactgtaaacttggccagaagaagccgacattaaccacgccacagtctaaattctggatcgctttgaaatttccttgctcagatcactttgtctatcacctttaaactcagcctcctgttaagacacaggacatggataaaatgtaataaagttctttgctatctatcattggaaacaggaacagcttttagcccatttcccaatagaattcttattttcatctgaaactttacaagagcaatctttattgttgtatcagttattttatgttttgataaagacttcatgatcaaaagcaaattaaagaagtgtatttattttgtgttacagttctaaaggaggagtccgtaatggtgaggggggaaagcagacagagctgagaggtcacatctcagacacatgggaagagggagtgagcagaaagtggggcagggtcataaatctttaaaaccttcccccagtgacatactttctccattaaggctatacctcctaagaagttgcatatctcctcctccccagcagcaccaacaactaaggaccaagtgtctaaatgcatgagcctatgagtgatgtttctcatttcagcaacaacaataacccacatttcttgtcatcatcctggttctttaagctcagtgcactctgcttgtagcagcctagactttatttatcccacttctattttttccaaattcctcttgcaaactagtgtcacagcatagaatcactcagtcaggccttcacagaaatgacccccacttcacagggccagattcgtgtgttagttatttctacgtttgctgtgaccaaatacctgagagaacatattgaacgtagaattatttattttagcccatagtttctgaggttttactccatattctttgactccatggatacttgggtctgtgatgtggcactagatgatgacatcagaagcacatgacagagactactcagcttagcacacattaagcagaaagagagggaggggatgtagacagatgagagctagctagatacatagacagacagacaaacagacatacagacagacagatacatagatacataaatgcatagatatgtagatagatacatagtacatagataggtacatagaaagatagatacataaatacaaagatagatatgtaggtacatagatatagataatgcttgcattatttggattttttccctttatctttttttattttttccatgtagctcatggtgtggtaccacccatattcagggtaggtcatccctcattaatcaaccctctttggaaatactctcacagacaacatcagaggtatgattctcctaatctggtaaacagttttcagtgtggtcatgttggcaatgaagaatctccattatataaggcaaagctttagcaaatactgcatatcagtggtggtacccagtatactgtcagcagtgtgaggatcaccgtggcctgccacatctttaccaatgtttgattctgtcagtctttaaaatttaagatatcctcttcggtatggattggtccctgtggttacaatttgagttttcactgtgactcagcagttaagaaccttgtcgtaaatatcttggtcactttcatgaaagaactgattgtaataacttttgccaattttttttttaagacagagattctctatgtagccctggctatcctggaactcactctgtaggccaggctgaccttgaactcagagatctgcctgcctctgcctactaagtgctggactaaggacgtgctccatcaccaccttgccaaagttcttactgggctttctttgcttttcttattgatttgtagatttttatatcaattaattagttattagcatgtctgcatgacatgtgtgtggagggcatgtatgtagaggtaagagcctgactttgagcgttggttctcccatcccactatagggtccagggagtgaccttatatcaggttgatagacttgagtgtcaagtgcctttacctattggaccatctcaccagctctgatttgtagatttttattatttaattacttattctatatataaattatttgcataaatgtactgtttaatttggataaatgaaatgaatatttctttacaacatagcttgttttttttttttatttttactttaagtgttttttaaaaccgattctcaactgagctagcctaacgttgagattctcctgtctcagtctcatgaatgttagattacaggaatgtacaatgatatccacttccttaatgatgatttgacgggaaataaaagctatattctctgaggccggtgtctgggagaccctgaggccacgtgccgggtaggcatgtgctctaccggagagcagtgaatctcagattcataacaggcttcaatgttgtctgctaattttggattttgataactgcctctgggattctgtttaacaagttcctattttccgcagtgtgataaagatattattttatgctttcttctcagagctttgttttagatgtatttgtttgttgatttatgaaatttttaatgaatttgatctgtagaaaataaaacaagtaagcttgaataaagactttgccacacgtgtattaagaaattgtttcggtgtcagtgattgaaccctggaactcatatgtgctgtaaacaagtgcactgccaatgagctataactctcttctttcattattttaaaattcatagacatacgtgtgtgttgtttatataatgtccggcatgacggtttttgtcatgttgacatatacacatcacatgtgtgttatacagtggtcaaatctagctaataaacaagtgtgttacctcacataattatcacgttgtgatgagaacacaagtgtactgtgtccttagttttcaagaatgaaatatgctgccattgggcatggtcacagtgccattcagtcgacttcttaaacatatccctgtaatcatgtcgttttgactaacatgtctccaccccggctccacttcacaccaggccagctctgataataactattttactctctgttcgcatcaactgtttaaattccacatgtgtgagatcatgtgacatttgtctttctgtgtctggcttatttcacttaacgtcttccaggttcatttatgaatcccaaatgatgggatttccttctttaaatagtattccattgtgcatgcataccacattttcttcatcaagttttattcaacagatatgttgattcagtaccttacgtacttaagtagtacttccataaatacaggactgaaggtgtttatgtaacattgattccatttcgtttgaatatataacaagttgtgggttttctggatcatgtagttgtacttttaattctgagggacctcccaagttttccatgatagctatattaatgtatacttctaccctctgtgtgtgtgtgtgtgtgtgtgtgtgtgtgtgtgtgtgtgtgctatcctggttctaccttctcatcaacatgttctgtttatcttgttttggttgtagctactctaaggataaggtgatagccactatggttttgatttgtactacagtgatggtgagaaatattgaacacctttccacatatattttggtcagttctttgtcttttgagaaatgtctatttttaattgatcatttgttttcttactctttccccattgtgtgttcatggtactctggttgaaagtcagcagggtcaagaaagtgtagatctgtgtctgtctctccagtctgttgtgttgtctacaagtgagtttgtgttggcatcctgtggtttgtcactgtaacgttgtggagtattttgaagttaagtagtacgatgcctctagctttgttccttttgcttgagagtgccttgcctgtttggggtcttttgtgagttttcatgagttccaggatgattttcctccttctgtggttaatgttactggtatttggtagcgatcccactgagcttggactttgctctgactggtggacgctacatgtagcagcatgaaagcacgggatgtatttccatttatttgtttcttctccaattccttttcagtgtaaagatctttcatctctgtgatggtgtcaacttggctggagtgaggattacccggagaactggtaaagctttgtggtggggtgtgtccgtgtcctgaggcatttgagtcattgactgaacaaagaggctcttctggcactgtaggcaggagtcatccattcaactgagggcagtcagatagcatgaaatgtccagaggattttaggtctttgcctcttggatctggggttcacaactcttccctcctggacatcagcacaccaagtttagacttcaggacttataccagaagtactccactgtccttaggacttaaatctctctctgagaattataccactggcttcttttgttctgaggcctgggtgcttggactgagccactgtacagtcttcacaagatataacttcgccaagtggcttttgagtcatttgacttgttcaggatgggaagagctgagggtgaattatgtaggggttggtgctgcctacatgagtaaaatgagacataattactcaggccttgctgggtacgcgaagagatgctgaggaaaggatctgagatatactggacgcccattaaaagccagttgctctgttggataacatctttaaaagtgattctgggagagaagtcttagtggaaagtctaacagctttgggtaatttaacatagctactagatggtggagttaggattcaaactcatttctatattgttttcttcccactctcctccacgccctttctttccatgcacttcccttatctttctctgccttttcagctatcctatcattccttttgtggatttctgaagctctgctcttccttactttctatggaacagaatctatctttttttctttttctttttctttaaataggatctctctgttgtcttggttggcctagaactcactttgtagaccaggctggcctcacacgcaatgattctcctgtttccccttcttgagtgctgggattaaagatgtgtgtcacctattcttactgcatcacagagaagcaacttcccgcccacttcctttcttttttttccatgttttatttttattagatgttttcttcatttacattcctagtttcctctccgaaaatcccctataccctcgcccctccccccgctccccaaaccaacccactcccactcctggccccagcattcccctatcctggggcatagaatcttcacaagaccaagcccgcccactttcttaccctaaagtgttacactttttattgtagcaattctgaaacatgttcccatgtcacttaggtatcgctgtataaggaaccatctaagcagagtggtttgagacagcagacatttatttagctccagtttccactgtcaggaattaggcacatcagctcagtagtactgatctggtccacactcatctgttctcatgcctggggcctcagctgagacgctgggaccatcctacagctggctagcttggtctcatactttgatggagaggaaccaagaaagccaatggaagccggaggctcttgggtctaggcacagagacagtgcagtagcacttgcagtgtcttagctggagctgttgtaacaaagtatcccagactgggtggcacaaacagcaggtgttcgtttctcatagtaagatgcatggaggtcaaggtcaagatgctggcttagtatatgatacagaccattttgtggctcgtgggaagccaccttctttctatgtcctcacatgatggaaagctctatctctttgttctttcacagttactaacccattcccaaggctcctgttctagtgacctcatcatttaaaaatactgttttagaacctatttactcttcattgcaacttcatgtgcacttaggatgtattctgaccattctctctccacatcctcttttaaccctgacttttggttttgtcttgtggcctatttagagccacctgggtcactactggactgacacagtccattggaacatggtgggttcatcagtgagcacacaactgaagccaatggttccctctcaccctgaatcttatttgtagttcagcatcaagtggcaggacaccctgcatcttcccccacccctgcctgcctgctgattggatcttttttgtgttgtcttacttcaggcagctacagctgctgtgagttcatgattgcaatggctgatttgaagctcttctccctatattctggctgttgcattcttcctaccccctctgccacagtgttccttaagccttagatgggatggtgtagatgtcttgctagggctgagcatcctacacgacctcattttaacccaattacttcctgaaagtcccctctcccatataaacatgctaggcagttagggcgtcagcctaggccctttgtggggttcagtgatatcaaggaaaggtaactccatttctttcactgcactgtatgctctcctacatgtcacatgtcacttccaagtttccaaagatgcatggggaaatctctcatcatcaggtagcaaacaatcaattctatagcagaaatgcaactcaactctgcccatttctacttgtgggtaaaatcagatcttggatattgagggctcagttgcacaggactgttcaggcatcagttcagagtccaggcttcaggttttctgaccagctggtcacaagcagcttcctacaactacatagcttggctttgttcatttgctagggcagctcagagaacccaaggaaaaagcacacttattggttcattgtaaggccacaaacgaggatctggatgaagacacacatgggaccatctgacaggtgcctggctgctcctgggatgtggaccagttcttcctcagtttcctcagactccacaggttccccagaactctgaacccttccactggagttttgtggtgatgtcactgcacaggcgtgactgaagcatgggcaactatgtaccaattggactgggcagaaggttatcatctgtggtccgagtcagtgagaaactcagcacaacctgtctgttcagattcttcatggcccctctgtgcagcgtgccttccttcctggtatggggcagaaccccatgtggaatgaaagtcttaggatctattcttagacaaagtagttaagagtgtccttctggtcaggagttagacaggaaagcagaaggttataatatacttttgcttttagtgatctgacctggggaagaaatatcctagttcttacagtgtaccttcaggagaaaaaagaacagagaacagaaaaaaaaaaaaaaaaaagaacagagaaagaggttttgctgaggcctaagttgccccagcattataacaaagacatttaaaaaaaaatctttttagcttagctttaaacctgctttagaaactaaaggccaaaactaaagctacacttactgttctagccaatttggaaatagtaagaaccatggaatctctctctctctctctctctctctctctctctctctctctgtatgtgtgtgtgtacatgtacatgcataccatttgtatgcatgcacacatatattcggctttgtgaacacagagggtaccttgcaggctagggagtatgtggcagagggaagacagtagttagtggcagtaattaattgcactcatgaatctgtatacacacaaggaagtgtggatttggaaattattttcatgaaaggctctctttgacctgaaaggaaatagagtcctcatgtatctgggccacgctgtatggagagacctcagcccatgctttcctttagtggctgtagttcaggattgtgtcgaacatggttcctaccctgcagcctacacagtgatgtgtagagcttcagaggcggaggccagaggccaaggctgcagtccaggctctgtactgattagttgctggtggaagaaatgtttattctttgtgttttactttcccccctcataacaacagaaagcttgtctcctttggttgttagtttctttctgtgatgggtgaacagtagccacccactggaacaggctactgaaaaataagatacccaggaaatgtaaagtgcaaagcctagcaagtatgtagcaggaagaaaatcttcctggctccacattgaagtagcaatattttgtatctactgagataaatgagagacactgtagagctaaattcatctgcaaattcatttgtttcactttggtttttaatgtggccactcgaaatttgaaagttatgttattattaattattattattattattattattattattatttttttttagtttctattgttgtgataaacactgacttagagaggaaggttttagttcatcttataactcccaggtcacactccatcactgagagaagtcaggacaagagctcagggcaggaaactggaggcaggaactaaagcagacaccatggagggatgctgcttactggcttgatctgcctagcttgttcagtctgctttcttccataccccaatataatctgcctagggttgacacttcctacagtggactgggttttcttacactaaccattaacccacagacttgcctatgaaccaatgtgacagaagcattttctcatttgagattccttctcagataatcctatcttgtgtcaagtttacaaaagactagcataacagcacataatttttgttcactaggggcttgcattctatttcttcagacccttcttttgtgatcatgaagtattgtataagtgttggttctatcctgaacatgtatagatatcattgtataggttgcaattccatttttttctaaagcttattaacattcactaaagttttaacataagctactatgtaggcatcttagtttttttctcctgacgtataaagtagagaagatataattcatttatatgagtaaataaaaacttgagtgcactggattccaattatgtgagcatcgtgtccaatagtaggtagaattcttttggctgcacacaccaccgatatagtacaaatcaatttaattaaaacaggggctattataagtatgaaaaggcagtggtattctgaaattagtgcctgtagaaagttgtcttcctatatctttttttctctcaaatttacttctttctcattggcaacattttcgtctcagctctcctgtccccatatatcaaaaacacagattgtaggcatgatgtatgttatctttgctcaagggtaggattcagtttgactttctctctggttttcatctgttgacctagcttgatttttagatattgatcttggtaggcctgggacagtttcaacttcagccagagaagaggagaatttcccagaaagagtgcttcttttgtttgcttaaagaaagtgtatcttaggtcttctttttagatatagtttgtctcccagagctttgtgggctgagtattcagtgacactgggtccctagtatcatcctctgagagcagtgggccctttaagaggtgggcttagtgtaagaaaattaggtcgtgagggctccaagctcatgaatggattagcattgttttgtggtcgtggttcatgggagtggactcatgctggaccttgtggtacaagttcattatcctagttactcaggaggctcaggcaagaagatctcaagttccaggcctgccctaaattacagagtgagttcaatgcttagcctaggtaagttagcaagatcctttttcagagtgaaataaataaacataaaagatgactagggatacaactttgtggtaagtgcttgcttaacatatagcagatataaggcacaaggtctggttctgcttagcacaaggagtcaattgattcctatggagggtgggctgttatcaagagcaggccttgactctcattatctcttggtttcttgtcgagtaatgttccttctgtgttctgggtcccttaacacttttctcccatgttataatgtagcaggaagtcttccccaactcaaccgtgcagtttggtccttcctgtcaccagaattgtgagcttcataaacctccttaaaagggcctcaacccatgtacttcattatagcaatgtcaaatagagtgggaccacagtggtaactaatatgtacagtcaatacatacagtgaaaagctcagaacagaaaagattagggctcaaagaagttctgtattttggccagttttaaacatccaggctaaatgttcatgtcttttaaaagcctacatgtttaaccaatacaccaagaaaatgctggtaaattgggttgtgctgacttgaattttaaggagttagcccttgccccatctgcattagatcacttcccattgagcctgatggctggacttcccatgaatgaagtgggtccaggtaataccaggaaagttcttctggaactgggaatggatactgggagcttgaggatatgtccttcagccttgcagccaaagcctgaaaggaaatggggaagcacaccagttagtgtctctgaccgactgtgtttcagatgttagcataatttatatatatatttcccaccattacatggctccccatggttcacagctcatgggcatggtgatggtaggaacaggggtgagcatcattgcatcattttctgtcattcacaaacaatatgcgaactaaagggatattctctcagagcgatggttcctacatcgcccaaaaaaggggggagggggccaggtccagaaggtgtaaagctcctagtctggtcaaacacaaaaagaaaattcaagctaatgtggtgtgaaaagacaaaaacgcctgttttctttaattctgttgaaatacaagagggcagtatgtggtagctttgttgggtgagtccatttcaaacattcagggagtctgacacgaatttctcaggaaaattgttctctatatgtggctccatcgtctccattgtaatggatgcagcaggcagtggatgtgaagcagtaaacaagagcctttcccaaagatggctcatcaacttcccatggcctgacatcatggagtacacagactggagtgggaaggcacagtgtagacaaacacgtggagcatgtgtgacacgttacaagatgcacaatgtactatgggacatgatggaagtatatctaacctggtcctgacagcttaaagaatccctggggaagtgctgtcctcataggcacttgaagagaaggttggactgggccatgtgggaaatccagggatgctaaatgtctggacctaaagactgaggtagagagacttgcagggtgaattagtgggtaaaagcagcttgctgctggcttgctgatctgtgtttgatccttgggagccacatggtagaaggaaagaaccaactccctcaagttgtactctgaccctaacatgtgcatgcatgtgtgcacgaacatgcctaggcacatacacacacagtaaagcaataaaatgtaataattatcattttaaaaaggtgaggtgaaataagaaacaagaggtctagttctgagcgagaagtaacagtcctggagtgtgaagggtacatgtgtcaaatacttagatcagtggtcagccttcctgatgctgccagccttattaatatagttcctcacgttaaggtgaccctcccaaccacaaaattatttttgttgctacttaataactgttttcttgctactgttatgaattataatgtaaatgtctgtgttttctgatgatcttaagtgacccctgtgaaaaagtcatttgacccgaaagggtcatgatctagatggaggcctgagcccttgtctttcttagggttaattgctgtgatgaaacaccatgaccagaagcaacttggggagtgtcttagttgctgttctattgctgtgaaaagacagcaaggtcaaagcaacttataaaacaaagcatttgattggggattgtgggcttgcttacagtttcagggggtgagtccagcaccatcatgacagggaacatggcggcaggtgcgcagacatggtggtgcagcaatagctgagagcttacatcctgattcacagacagcaggcagagagagagagagagagagagagagagagagagagagagagagagagagagagagagagagagagaaaatagagggagaacgaacagagaaagatagttaagatagatagatagaaagaaagaaagaaagaaagaaagaaagaaagaaagatagatgatagatagatcaatatagagatagagattgaaagagagtcttgtgtgggctcttgaaacttcaaatcccagacccagtgactcacattttccaacaaggccacacctcctaatccttctcaaatagtccagcaattggagagcaagcatttaaaattataagagcctatggataattataagaggccagagcaccccagggaggaaagggtttatttcatcttggagaagtgtagcttgttccctctgggttgctcagtttgttttcatatactatccaggaccagaccacctgcccaggggtagcaccacctacaatgagctagaccccctcacgtcaattatcaatcaagagaataccctgcagacttgcccacaggtcagtcatatggaggcattttctcagttaagactccttcttttccaatgacctagctgtgtcaagttgacacagaaacccgccagcacagtcctataattagatttgcatctgactcatttttcttatctctaaattgaaagggatctcctgctccctgcagttcctttctgctttaatatttcatacattcctctggctgtagaatccttaatcccacgctagcttccagatctcctgggcagcaaggcccaagattataaccagggctggaagagggacgtggactgtagatgggggtgggcagggagaggaagataaatagatgctgtctctttcccattagacgttagtgaaaagaatgggaaggtagcaggaacaagaaacgcgtaggtagctttgccttctcagcaagcaggtagacgacatctggctctgcttctggcatggggaaatgtaatattctcccatttctgtcaaaatgcttaaaggattgcattttcaagtatttaatgataaataccatgaagcctgaaatgtactttaaaacactggggaggttacagttcagtggcctagcattcataaggctctggattgacttccccagccttgcaagtaaaagactaagtacacaaataaatgagtgaagttggggctgtacatatgaaaggagattgattatggcttggtattgttaatattgagttgtaggtacagataaatccaacacataatttaatctgcttttgtgttttgcttgataacttccataaatcagagtgaaaaataactacttctaacctcattacctaaagttctttattattattattttattgtacaagtgtagaatggatcagactctctcttggccatataaatgtcttacaaatattgtattatgaatagcaacagactattttaagttatattatctacttggatgacttaaagtgtttttagactacattgaaattacgtaggtgggtcaaagaaagaattctgtacaaaggaagggacatagactagggaagtcttgggtaacatgaacatgacatgaacaggcttgcagttctgtgctgggtcagtctgaaggaggctttgggtatcgcagatagtcactgggcttggaatcaggtagagtagacagttatatactcgttgaagggtaacatataatacacagccaggcaccaagccaaactctttgtgtccttggtgtcacacaattttaatagctgccttattacttagatataatggttttatgagtgagctagcagagtcttaagttataaaacttgtctgtgactgtatagacatgtaattcccaataactgttatgaagagtgaagaactgaagtccagaggttaggtggcaccccactggggactagaatggctgcatgtaacagggaaaaacaaaagagtgactcaccacagggagagttctttctttctctccctttgctaatctaggtatagttgacctatgactgctatgggtttctaaagctcagggtccttctgtcttttgcttgggtgccaaagccttttagcctgaagctctctgaggtcagagagtgactcaaacaggagtctgttctttccatctcctatgtgggttctgggactagaactcaggtctcaggtttggcaatcgccaacctgctcacacatctcactttatttcatccagtgatgtagggaatggagttttccctcactgtagagacaagaatgtggccatgagtcaggtcatagaaaacttatgtacacatgtttggacagtgctcaaacattgatataacataggtttcctttgaagccagtggcttctctccgtgtctctttaatctacatctgctcagacggccacactgacatgccaaatggaacatgtgccaaacctctttcactgttaagagcttgttcttatttttatatctttgtggcttcaaacttgttgccattgccctgctccctgtcacccaagggctggagaaacgggcatgcagcaccaagcctgtctcaaggtttacttttaaaaatttattgatctgaaataaagccttgaacgatggagcctagcccagccttgaactttttgttctgtctgaacctcttgagtgttggcattatgaatgcgtgccctaactccccatttaggagttacttagttactatcaaaaaattaaactatattttaagtggttttaatttacaattgcaatgatagtagggcattggagctaggagcttgcttttgatgagaataaaaatattttccttctagttatttttgaattgaaccgaagggtgaccgagcatcaaattttaggtgtatgacctaaaatgtgtacaagagttcataggaagaagctgtctccaccagaagctgacttcaggcatcactgagcagaaactcccccacaggcagtatagccacagcaggtcgagtttcactggtcaccctgggaaaggagtgctatactagtgtggtgacaccagtaggctcaagcttcactctcatggtggagttaccactgcagccatgtgcagcagctgagcatgaccggagagtttgacattagagtcataatatccttgtgagcttgcgcgtgcgacataggttctccaaaaataagttttcagggttgtcaaggacatgagagttaagcaaggaagggacctgaaagtgggaaataagcaatgagcgatctttattaccacaagatcttcaagtaagcctgggtttcaggatgagttcagaaaggatgccccacctggaaaattagtcttgtcttccaggagacacagcacttggtcagtcactcataacagacatctctactcccagcccatgttacatagacgttttcttgcattagatattctggctctctcattgtttgccaacacactgcttgcttgctcatgtgtgttgctgtatgaaactcatgacagctgctcttagtcacacgtgtgattctatgctgaacccttgatcagcaaatgagaacacttgaatgattgtagatttctcctctggatgccatttggaggaggagagggggatggcaagtcaagatttgagaagacaggaaatttgagcccaagagactcctataagtcagggcccgcagtattcctgcaggaggagagagtcaggtccactctgccattgagtttccctgcaggaggagagagtcaggtccactctgccattgagtttccctgcaggaggagagagtcaggtataccctgctgttgaagaaccctgaaaggattcccagcctgttcccttgtttatttggctgtggctcagagatgtaggttttggctttggtcttggttcctgtccttggttcttcaaatgagattttgaccctggagggctcaggtccagatgcctatgagggctggtaggaagtaggccaggaggctgggaatggtggtgagagacagtgctcaaactggagcctgagaaccttctgaaaagacatgcaaattaaaagttgttgtgttttgtttttttaagtccagacaagctaaagctaaagctaaatatgtcaaggatatacctaagaactgttcagttaagtaccccagttgtgtatattcacaggtcatatcccataaggagataacctggatgtgactgaggtgtgttgctcacatacgttttaatgcctctcattgatttctattggttacatcagaaaatcaaagggctctgtttcagagacccgtgttacaggatatttgatcacactgtgtacctcaagattgtgttatttactggaaaaacctattcttagttgtggtgttgctcagccttaccacacagctttaatctgagatccttctggttgaatattgtaaaccagattaaataaaatcaaccatgggtcaagaggaagtgaacagaggattattaagaaaaaaccggccaggcagtggtggcacacgcctttaatcccagcatttgggaggcagaagtaggcagatttctgagtttgaggccagcttggtctacagagtgagttccaggacagccaggactatacagaagaaccctgtctcgaaaaaacagagagagagagagagagagagagagagagagagagagagagagagagagagagagagagaggaagagaggaagagaggaagagaggaagagaggaggggaggggaagggaggggagnnnnnnnnnnnnnnnnnnnnnnnnnnnnnnnnnnnnnnnnnnnnnnnnnnnnnnnnnnnnnnnnnnnnnnnnnnnnnnnnnnnnnnnnnnnnnnnnnnnnnnnnnnnnnnnnnnnnnnnnnnnnnnnnnnnnnnnnnnnnnnnnnnnnnnnnnnnnnnnnnnnnnnnnnnnnnnnnnnnnnnnnnnnnnnnnnnnnnnnnnnnnnnnnnnnnnnnnnnnnnnnnnnnnnnaagaggagagaagagaagagaagagaagagaagagaagagaagagaagagaagagaaaagaagagaagaaccatggagagtaagagagtaagagagagtcagggggatggatagagagacaaacaggaagtagaagagaggaacatccagcctgtaggtttttgagatgacatgtgagagggccattcctagtgggacactggctgaggaggatggtcagctgggtgttttctctgcctctctgagcagcaggctttcaccccagcacctggctcctgagtcttcattagtaaaatcgaacaattgagattttcatttacaaaaccccaacagatctggctttataaaagcaagagcacaacagaaaaactttgtcctcatttgttgtctaattcataagatttctgtcattcgattgttctggtgaacccagtaatcacagcgtagagagttgtcatagttagggacactgggagtgcttggtaatagagattaggctcaagagagacaggtagacttttaccctcagaacccatggtgaaaaacccatccatatcattagttaatgtaaacacacacacacacacacacacacacacacacacacacacacacaccactttaagcaaaattttaagaaacaatattttccacattccaaaaactaatgtttttcatcttatttccttttggtgaaaataatgcctatgaactgttaagtttatcttacaatttgccagtgggccacagtgtgaattttataaaaatgtaaaagagatcactggtgtaggggaagggacacgattccatggttaaagcatttgcctgagtatggatggatctctgaaatccacacaaagtgcccagagggcgtggcggctcacttgtgatcccagtcccagtgacggaggaccctggaacaagctggctagcagaaccagctatatttgtgagttctggttttgatggatgaccctgtgtctatgaataacacggaagagtgacccgggatgatttctgacatcaaccttgcatctctgcatgtacaacacacacctttgtgccatatatgcagacctcacacaaaaatgcagagaggacggtgggaacactgtttttgattcttcattaactttttaatttagtattttctcacggtttttccttttcttaccattttttctgatcccggggtctcaggcatttactcagtattcaggtactcactggctgtcatgggacccaaggaaagcatggactttccttcttaaatactccaaatgtcacaggaaaagtgagcatttagacggtaaaacccagtgcagaaaatcactttgctttctacaaaaggcttttcctattctcatctatcacaatggtagtacatctctaatgcaggacaggttctagcttactctgaaagataggaaactatctgcgtcttgagaaagtgatttaattagatacaaaatacaataatggctagaaataatggcaggaagtcataatattgtagtagtagtagtagtagtagtagtagtagtagtagtagtagtagtagtagtaggtaacgacagtagtatttattaagcccttcctgtgagatgataattgatttcagagctggagagatggctcagggggaaaggaagcttggtgattgtctagagcatgcgcactgggaggcttgcaacccatagctccagctccaaggactttgatgctccttcctggcctctgcactcaatgccagccacacatagatctacatttaaaaaacaatcttttaaaaaagcatttaattctcacgtcaactgtgttgtaatggaaatatgctccttttccatgggaaaaataagacaggttaggtgatgtggccagagcctgagggcctggaactcatgactgagtggtttggttccagaccctcggtctccatcctcattccccaaggtagaagggtggcacagtctggcacagtcaggggcaatgcagtacagtctggaataatccggcccagtctggcccagcccaaactcacctttactctatggcatcactgcaaaatgtgcgtggcagatgctatgaggagagaatgtttggttgcgggtatggacgacgacgagagatccagctcctgaatatctctatgtggacactcaccatggagttggtaaaaatgactgaagactcaccttacaggggacagccaatcctttgagtctatcctcatatgtaatattttattcttgagataaatagattatggagcaagctgttacttttcattgaatatttatttatttatttatcaatcaagatatgatcttactgtgtatccctgcttggcctgaaattcactgtatagaccaggctggccttgaactcacagagatccacctgcctcatgttctggggctaagggtgtgtgccaccatacttggcaattgtattttctttttatttgtgtgtgtatctgtggaaggcagaagagggcatctgatcctgtagagttttagacaattgtcttctgtccaacataactgctaggaatcaaactccagtgctctgaaaaagtagcaagtgttcttgaacattaagccatctctgcatcctctatgaatcagtcttgatcttgggaaacagcaagattaggctttgcttttacaatatttcctccttttccaaatcctaggttctcaacattaatgtgtgtgtgtgtgtgtgtgtgtgtgtgtgttgctagtagctgatcttgatttctgttgtgttttcttaggtgtggtccacccatctttttggttttgtttatatagattctctcattggttgagaatcttagtttctcctttctccacttccccagtgctgggattataaacttaaaccattatgcctgattttctaactccccccacccaactcccactttgatgctaaggctcaaactcaggttctcctgctcaggagggagcctttaccagcgaaccctctctccactcagccctccaccgagttcttactagcaacacaggtaactttctatcttctatttctggagtaaagaatacttagtgttcctttcagttgcatgcatgggaggaaccaggcttgcaaaagcacagaatcgagctgtgcttgaagacagaccagcgtggtgacaacaggaaacatttatgtgcttagtatagatagctatgttaagtgctgtttaattatttctttagctacaacatactagtcatatgctaaacacttggcagtgaagagcagaaatatcttcatggggaagtgagcttttaaggaacctgttagagttaagttggtagatgttccaagttagtccccagactctctagtttttaggctgttataaataaatctagacagtgtagaatcctgtgttcattacatatcagttttgtagaaatattaatagttattctgattgatttttatgttaagtataaagctaaaaaaataaaataatatggcccaggggtgtggctcagtggtacaccccttgattaccatctttgagattcttggtttcatcccagaaaagcaataagtggggggagacgctgtctagcccattcatactttgcaaacttgggagatagatatccaaaaatacaaaggcatatgtgtcagtttcctttccacagtatgtctgcaattctgatgtgtagcaaaaataacccaaagtgctccttttgaaaataactgttttcactttcagaccgtacaacaagcatctgctaaggcacgtaatggacgctagacgtttgtgttccctggtggtcagtaatgaattgagaaagtacagaaagagattattaaatgccactgggaactattttgttactagagtttaaaagttatcgcttcggtgaagtaaccaaaatagctcaagacttgcatgtttgaaagtatggggcctgtgtttaaaaatcatatttcagcttttcctgctaccattcaaagttattataagcaagcattagctctggattctgcttctggccttactgcacctcagcagatgggaacacactggacagttagtgaagggatgagaggatctagcaccccgcctcttggacctcttctgactccttctcaacccatgagtctgtgcgatctttgaagaagaaaatggttgtcaagcagttagtttgttgagtttagacttatgaggagctgggattttcagggaattttgggttccagatgatctggatagaaggctcttaattgctgtcatttgatttttgtgtcctgatgtgatcaaaataataacagcaagagacaactatgtaagccaacaggcaggtcaggccggcactctgcctgtgccctgcccccacgcacagcacacatgtgcactcgttcttctcctatcacaggaacatgccagagtgcttctgaaaggtttgtcctcttagtttatccaagggctagaagaggaaaatgatacttttaagtcaacatttttatctggtctttcacctgagctgaggagggagccttctgaaatactatcaggtgaaaacaagctttgggtgtttgcatcttgagactgaacacagttcatatctagattgtggaggcctgacactcacacaatgctgggggactctttgagaatacaaaaaagtcacaagcggacagctagtcacatgggcttgcagagccttcttcaagaagagggccctgctgctaattaactttgtgacagatcccctctgataatggctgtttttcttgcctacaactatgaaagaaaaatgaggggcgaggctagaggatggaaagaaaatctggtatatttctcttcccagacatccttcaagccagcttgaggagttgagttgaggagtcctttctccttgttcctaggtaaacgataagaaacctggaagtgcacaggacatagttgctgaatagatctggccctggctcccttaccccctttagccagctttcatatccacagctcatcccgtgccaggagcgtgcagaaatgccgctccgcctgctctgggtacacagatggcctgccatcaacagattccttttcccctcctactggagttacaacccagtccaccaggtcgatcaacccaggcgtctttcacttccaacaaagaccagctgagttacatgaaatgggcgtgcctggctctctctccaagggtgctggtctccaagacaccttctcccctttttttcctgaagcacggccgcgctgacacacccctccctccgcgttgtcgtggtcccctccccatcccgccccgccccgttttccgctttcagcctccctccctacgactctcccctcctttactctcttctgtttattccctccccctccagccactccgggagctgcccggcttttgcccggctacacctacacttcctcgggcgctgtccagcctacgggtggccggggccggttgggtgcgctgtgcccggggcggtggctgcagagcccttcctggtggccgctcccttctttccctcctcttcgcgtcatgtcgggcacttgattattattgttattttttttcatccctctcttagtctgtcccgtcttcccctcccccttcctttcccaggttgatttttttttcttccccctcttctccgggcttgcccatgagcctcctcgggagctaccggaaaaagaccagcagcgatggttatgaatctttgcagctggtggacagtcacggggactcgagcgcacggggcgcggcggctggcacgcagagggcgaccgcgggcgcggtgcgtagtcccgcccggcagcctccgcaccgcgccagcaccacggacagctcaggtagcggccgctgtggctcagtccttcggcccggtgcacatccccggtccaggctaggagaggctgggttgtaggccatggcatctaataccacatggtgtaacgtctctaatttctttggtccagggagctaagaaacgttagatccgtctggaggctcggtgacattagcaagcacctcttaatctccctaggctgctgaatgcaccagctgggggcggggagatgaggaaagggaggggaggagaagggagggaggggagccaggggagggtggtacctggaagcaaagtggctggtttctccgcccaactgtctgagccgaggtgaaggagaaatgcttggtgcttttgctgtttgcagaccgcttttataccagttgttcccctgatggctgctgttatttacaattatgtaaagctcctctagggttaatgtttcctttctcccacggaaggctttactgggatcaagagccctgtttaacaacacagcccttacactttacacaatgcaatttgtttcctctgttgttggctttgatcttatccttttgcatgctaaaatttcttaaagctcctcatatagggagttggttctaaagtttgtatctgtgtttgcaagtctcagaaaaatgttttaatgagttacagacctctcagactccgtgacagttagcgatttgtgtatcaaaacagtcatccaggaatccctgctgtccaaagacttgtgtaagggctgtttgtgtacttttccaggatgggaaccacaggggccggctctacctttgtggctttaatcctggggcagctaaggactctggtgggagtcatgttgggatgaaaccaagtaggattttattccttgactttataatcacttgtggattttaattgtataatgtctttccttgggctatcattttctatttccgtcttcctgaaagtgacatgaaatactatccccagatatttggttgttctagtttaaaaaggagtttactagttaagctctggtttaaatcaaagagggtactggtgtgaggttctctcggatcatcttatatacagttaacattgttcctagtggactgctgttttcagggtctgggaagtgatgctatgcttggttatttgagctgtgcctgtctagatctatggtacatgaatgctatttatcttctggctctccttcaaagctttaagagattcttgtactctgacccatggtcatttgaggaaacactgtgcagagaaagcagctccatatgaggaatgtgaagacaggagtccacgagtggtttctcaacaatcatttcaggagtgggatttgtttttttttttttaagtattgttacaatatagaagaaacacatttttatgggaaaaaatgtatttcctgggccaagtgatgtccaaacacaggattaaagtagagaatagagtcttttgggcctctggtgggttatcatttggtagggacagccattcgaacacagaagacttagttaggtcctatagttctgaggactggccttttctccccctatcaaatcaggtttttcagtaggtggagagaacaatgaaatgccttgtgaaactgtgggggtgggaagaagatacagttatggttaaagtactgttgccaggtgtctcttcaacttcatggaactcgtgctgtttccagagccccctcccccatccctcttcgaggctccctgccacgtctccagcatctgctgaggggagtgccttggcttggctgcagctggctggtacaactgacgactggatgcatattttcgactgagaacatagtttaagagtgataatgtctggtttggatgagggattagattctgagaaccatatttgtttcctagtgcaactgtatgtcttgcctaagtatagtcttttgtctaagaggctcaaagtgtgtggcccatgctgtgtaactgtatccatttgttagggtatttaattaaactcatagatcatttctaatgcaacagtcatctgcccatttatccggttgattgtgtatgacatggtctactggatagtaggttggttcacggggctttgttctgacaggaatgtttttgaattggaacaataggtggctgttcttgtagaaaatggaaaacttagtctcagtagtaccttacatacgtgtgccaatttatacagaactcttggacatttaccttatttccaagaatgctgtcacacagataagatagtagcacctgtctgtgtgccctgagacttggggagtggagcctcagaactgttgttttcagctggaaaccccgggtttaacctctgctgttcctctgttgcaaaagaggaaacaggtagacattcttaacatgcagctttagctgaagcgcaaagcaatatggccggagttgcacattttctttaccctgcggtttgtgtgctccctaattatggcatgagatgatgatgatgatggagacttgcctaatgaaaaggagctacccagggactctagtcttcttcttctttttttttttttttttgaaaattattgcttttattcaaatttttatttgtgtatctgtgtgtctttatgtgcttgtgtgtgtgtgctcgagcatcatatgtggacataagaagacagctttcaggagtcaattcttcccttctaccatgtagatcccaggattcaagctcaggccttcaggcttggtagcaagcaattttacctcctgactcaccttactagttttgtttggtatggagatagggtctcaaagcatagccctggctggcctagaatttactgtgtagaaagatcaggctgggcttagacatggcctcagcttccgaaggctgagattacagatgtgccgtcatgccatcggtcttctgggctgttttcttccattgaactaaaatgactttctgtgtaggcacagtgccaactgattgttgaaatccaataatgttttctattttgattttccatctgttttcaacggaaagagagacagctgttctgaagattgtaataattttctaactcaacagcttcttaagtgttagagtccagagcagtctcccagtgatccagccaggtccctggcgctggggctgtcctactacactgcttgagaaacttcatatttctcttgtgtataatctgccttctagggaaggttgaactcataaaacccacagaagtcaaattatttagattgagccgattaagtccaaaccaagttcatacctataggctataaaagacagtcctcttaaaatctggaatatattagtgaacttgaaaaaaataaagataatgaagttttatgatttgaatctgaaatgtttctcatggactcgtgtgttagatagtcggtgctgttgggggatgggggaggatttagaaggtactgcttgtctggaggaagtgggccacatgggtacctttcatggctctgcctttggtggtctcacctgggccagccctttccttctctccacttcctggttgctatggtggaaggggatctgctcccagcatatcctccctgccatggtggaccgaaaccactgagaatgtgagcctagataaagcctttgcctttttaggtagattatagcaggcatgttgtaacggtgacgaaaaaggactaacacagggagaatgctaaaatacttattaaaattgagtgggaaaatttgtttggaaataaaagttgactttagtaaatactgtgttacgagtacttaaatgtagtatttacatttttaaaaaaaattatttattttatgcacatgagtacactgtctctttcttcagacacaccagaagaaggtgtcggatcccattacagatggttgtgagcccaccatgtggttgctgggaattgaactcaggacctctggaagagcagtcagtgctcttaactgctgagccatctctccagcccagtatttacattttgacctgtgttttagtgtcctgaaatctatatttggataactttatacttcatagaagtaaacacataggtaacagtcttttgtatttatgtccatgtaggggactttataatttggaggcacatttcatctgtaatttattcaattgtgactaaatatgcacttgttaaggggtaggtaatgagccaaatatgttcagatttccaatagtgagggctgccagacatcttgcacttggaaggagaatcctaggagctgaacttgcctggatgtgagggcagtggctgtgatatcttcagccagttgatcactgtggtggatgtgtctgatctgttcacatcctctctcacctctccatgcacatccttcttcacgtggcttgtcggctaaagaggacaacctccctgacaggggcgggccagtctttggtcagagtcaaggatatacaagtagctgcatgctcctgattggagcctccaaatacgctgtcaaggagaacttccaaagaacagcctcatagcccacagaacacattttctgtccatctacccacagaacacattttctgtccatctacccacagaacacattttctgtctgtctatccacagaacacattttttttttttgtctatctttggactgctctggtcagcagagtcctttctgtgttgggaggaaaaaataaccttcctgttctttagttacaagacaaattcaatccctcttttacatggtgatttttggcgctttgggaatggagatttctcctagcgtggtctcttttctaggccaatcaaatccaccttcttctcttttattttccactcaagtcatttccatgttattattattataatattggagaataattcatacttttgatttgacataacaggattttccctcaatttttttattataaatggctctggaactcatggtttaaaaaaaaaaccctaaagaatacagatgggaacacaatgaaaaaatggaaagtaacctctctcatctgtggtctcttcggctcttgcctcagagtcaacccttatgcctgtttctgggggacccaggtaaaaaagtcaaatttggtggcacacatctgtaatcacagcacgcttagagacaggaggcaggacaagtagcttggagcagactgtggcagaaacaaagtggaaagaaagaaccaattcctcaaggttgtcctgtgacccccctccccccatgcatgctatgacaagggcatgcctgaactcacgcatacaaacaataaaaaattaaaatgtgaaattttaaaggaacattcaacatgtaattagcgtgtatataatatatattatatacatttgtgcataacattaaaattgtactaaaatgcaattcaaattttattcaagttatatatgtgttttataataatcagtaatgcttaatgatagaatggatatgattcaagcatcatgctaaatacatatggtattttttaaccttcataaaatttatgtaggggagaaatgacaataaatgcaggcaagagtgtagagagagaggaaaccttgttaccacttggtaggaatataaactggtgttgttaccatggagatcagtgtggaggttagaagcctaacagcaaagctatcccacgacccagctacaccactcatgggtatagatctgaaggaatgtaagtcaactcactacagagatatttacacagccatttattgctgcactattcttttttttcccatttttattaggtaattagctcatttacatttccaatgctatcccaaaaagtccccccatacccacccaccgccactcccctacccacccactccccctttttggccctggcgttcccctgtactggggcatataaagtttgcgtgtccaatgggcctctctttccagtgatggccaactaggccatcttttgatacatatgcagctagagtcaagagctccggggtactggttagttcataatgttgttccacctatagggttgcagatccctttagctccttggctactttctctagctcctccattgggagccctgtaatctatccattagctgactgtgagcatccacttctgtgtttgctaggccccggcatagtctcacaagagacagctacatctgggtcctttcaataaaaatcttgctagtgtatgcaatggtgtcagcgtttggatgctgattatggggtggatccctggatatggcagtctctacatggtccatcctttcatctcttgctgcactattgttgtgtgtgtatggatggatagatgcagatgtgtacacgtgtgcatgcttatgttgtggtcagaggacaacctcgatgtcattcctcaagagtcttccacctttgggagcagggtctctcactggcccgggacttgactaagttccagggaactatatgtggggtggtaagggaactagcaagacagggagtcgggtcatggggcatagcagtagagggaggaacaagacaaagtgtaatatgtatggaaatgtcccaataaaaacatttctttgtgtgctggccaaacaactagtggaaatggagtcaagttccaagccagtgactagctttgtctcttctccccactttgctattgcatttgccaacctgcccagcctttttttttttaaatgagttctcgggatttgaactcaagtcttcatgcttgtaaaggaagcacttcaccaaccaagttatctccccagcccatatattattcttgatagctatgacagaaccagcctacatgtccacaagcagatgaatggattaaaaattgtgacaccatacacacacacacacacacacacacacacacacacaccccataatattattaatttgtaaagaagaagaacgttcgttgttcattttacagggtgattttattacactttaatggatggaactgaagatcatcttgttaagcaaaaagagagtcagaaccaacgtaaacattgcatgttttccttctataaatgcaggatgtgaaaggaaaaggtggcctgtgatgggagggatgcttaaaggaatgggtggtgggaaataagagaggacaatggccagggcatctttgacacgggatgaggtaactagtaagactgggagaggggtcatggggccagggcagtagagtgaagaatgagaagtaagtataatatatatgtatggaaatgtcacggtgaaagcatttctttgtatggtaaccaaatagctaatgggaaaaaaatgcagtctaaaataaaaagaagctgcttaaggtagagaacaatggttctctcctttgtgcatttgaagtaactggggtgcagaggggttaagctagttctctctggttatgtaggcttcccttgttcttcagggagcagaacactagaaaaatgcccttcaaactgcaaaggaaggcttgtggtgagttttctttgtctgcctctttctctgaggcaaggtggggtaagtgattgaaggaactgcaatgaatgtggttgtttttcaccctgaaactcctccaccatgacagatatgtcgtccttatttacatataacataaaggatctttaaactgcaggaatggcggagaccgagctgaagccgtgtgggatagggccgattaagcctcgagaggacactttgagactaacataattggtgcaggtttctaagatttatggaataatatcttgccaaggacaatggatccctagtgctctcaggatgaaagccacgatgttctgaactggactcgggcagcccagtgtggggtctctgagccctgcccggcagcacttgctgttgatccagactggagcatgctacccccttcttctaagcttttgcgaacacttgccccttagctttgagcatcctattcctgagccatctggatactccgttctatcactgtttctacctttcagatgcttctcggttctgtggcagcctgtggtggacagggtcccagcgccccatcggcctggcctttcctgaacggccggccgtgatgcactgcctggtctgcctcttgttgggctataggcaaagttcagagggaggcctagtctctgccacctttgtattctcttcactgcttgcctgacgaatacttgttgaatgaaaggaagcatggacagattctgaatttttaaaaagggcatttataatggaaagtgcccagccgaacctaaaaataagtatacggctaggtttgatcagaaatgaggccaggcttaaatgaaactgtggcagaaagctcgatcagttcaataatgaacgtttgttatgtgcaagagttccagagaaggaagatggttaagccacatccagactctcaaggcctccctagtgtaacaatggagtaaaccgtttatctgaagactgagttctgaccaaaaaactgcagcctatcgtttgccttacaataaaggtggccttttgtaaacagaaaaataataatttaaaataccctttccccctctctccctcctccttccctccctctttccctccttccctccctccctccctcccatccatatcccccctttgctgtttcttctttcactttctgtcttagtcagagatggcttttttatccacaagcctgagtatttcttagccattagcacggactttaaatcttcaccattttcacgtttcctattagaagttttgcacatcactcttgctatccacagtcaggcatggcacactgttttacagtctgcattgctctccagagctaccttcttttttcctttttgagaaaagctgggactttgaagtaaataaaagaatcctggagataaaatttatgtgtttctttcccgcaagatttgtaagctagggaaaacctaaatcgcagttactttgcatgaaaccattcttcctgagacttaacctggaaattttgatggagtagcccagtgtctatggagtatgtccttcaaggtccaaggaatgagagaatttcatagcttgtgccaagggatctggaaaactcttctgcctctaattgctttatatctcaggcccgaatctagatctaaaatatcttatttcaatgattcatccagatataatattaaagggcattagagatcgaggctaaatgaaaaatgcaactgtgtgtagtagtaacagttcgatggccaccaccaaggacataaccagcctacttattgcatgagtggagttaagtctgcatatgcagaaaatgactgttaatgctctgcagggtggagctgcgcctgagagctggcaggagtgttggtgtgcatgggtagccacctcccagagaactctgctgggacagaacccacattagaatcgggaggtgagtgtgcagggtaataggggacttgcctgagaatgctgaagctgagcagaaacatgcacacatcaatggatggagaagggaaggaacgaataccaccagaccaggagctctcttgtttcccactgccaggccagctggagttgctgcctcccctgagcccacacgctccccagcaacctgctttcttctctgctccgactctagctctgcccctacttacccagccagctggcactgccctggtgtgggtctccagtcccttaggttatcatctaaactacctcttgagagttcttaaaggttacactggcttccagcccacctctgctcaccctacttactaaacagagattccctgggcccagggttgataggtggggatgccagtactgagttttgtggcaccggctgcaggtgcagggtggctggctgcccttggtttactatctctaggtgagcatggggctctgctcgcttccttgcttggtgatggcgtcacagcaagaagactcagacaccagaggaggatgtatgatgattattgggaatacggattcttggtttctatgggaacaaaccctgatcctagaggttgttaaggactgattataccaatcattttttggctctatggactttgtggcaaaatcttagtggggcagctgttcttatttctctttcttctagttcttctttctttctctccatgctctatggtccttccctcctttttttttcttcctcttcctccatccttctccatcttcggcattctcatttctttcttcttctgtttctactttcgtctgcttccttctttcttccactccccttttcctaccttgtctccatccttcctcccagtgagagagtcagtatgtctgggagacttggtgcacaggatgggctgcagtcttggttttatgtgcgtgtgtgtgtgtgtgtgtgtgtgtgacttagacccccctactgtccccctacccatcacttgtggcctaatatgagtgaacaggaacattactttcagatttgggtaagtgcatctgacctccctacagtttcactcgctgcttcaattagcaaagtgttccacccgacaatgacgacctcatgaagaacaatttcttaagtgtcccagaggttgtgtgttcaatcagaggaaagggggggggggcgtgctttctcagtccaagcaaggcacgtgagattacacatccccattttgcccttcctttcccttacctcatctttgcaagaaaacaaaccattgtcttcccttcccccatccatggctgatgcctgaatttttagttctcttaaaatacagatttatgagtgctgtgcatgcgcatgcgtgcgtgtgtggtgtgtgtgtatttgcattgtatacatgtatacacaaggtggcacacaccagcatattatgagtcagcaactctaagttctggctttgccatttataagctacccccttgaagcagtcattcaactgagggatgtccattttatagccggtacctcctcattctctcattcctggacatctcgtgccttcttttttgctacagagaagctggagatgctgaggaggtcgaggtagagaagaccttggcttttatgaacttccctggggctggataaatggctctatggtttgttgaggaagaactctgttttgggaagagggaaggcctggctcactgtggtgggtcaggaatgctgactccgaggagacaaataagcttcacactaacatggaagaagctgacaaaggcaggcagaagaaacaatagcaagcagagggcattcagtggctgcactgtgcttcacgggtgtagtctgagagcagcattgtgaggccgactcatgactgtgttatagtgtgcttgcccaagctgagatagtcacgatgctaactggtcggttaaaaactgtgtagttttacagataagctggtaactaacacaaactcacattagaagtcaggctctcactatgtagcccaggctagctttatgatcctcctgcctcggactactgagtgctggggtcagaggcatgttcctttagagttaaacttgctttggttagcttgtaaagaaatggtattatagcatgttcagacatcaatggcattatcctttgccctcactgtgtcctccattgctctcccccatgcacagagataaactttaaggctgacttgttttagggtgtttgggttctattcttacaaagagtatcatcatgctttagtcagaccggacccgtctttccttgttattcctcagatgggctcttttggaatgagagtgcttactatttcaaagtggagtggaagatagagaggtgtcccacagaattaccttacccactgtgtgtgtagctgctctccttagctgcatctccatcatcatcatcgtcatcgtcatcatcatgtgccttgtcgtgtgtagatcttacagtggggagatggagagagtggtgtgaccatgatgtaagaggaagaagcctagaccctcagacataatgagctgtgacagaggtctgccaaagcgagtcaagatcctgggtgccctgtggctatgagacatcagctggagggacagaaaattcggtttcaatggccaggaaaactgaaaggttgtcttaaaagtatagctgaaatttccacagtatcacctggttttaaaatggagccattgaagcccccaagtgggataggagtctggctttgtctctgaacgtgccaggatagtgctgtctccattacgcctgtcactggcacagaggccggggaattcactgtcttgttttgcgagcagttgtaacagacgcgtgctctatttcacgtctggctttgttttcataccttaccccattgcacagaaactgggcctcttcccctttccctggcccccacaagcctggtttattttataatatgacatatgcatgttcatgaaaaggacatttaaaacaattcagaaaattatataaaagtgaaaataaaaaaaactttctgccagtcctagtcccaatattacaggtttctgcattctcttagaatgtctatgcatatacagaagtatgcaagccagcccacaaacacatggtgattccctcatggctatgtacatatataaataagttcattcactcatgtgtgccatgtagaatccatatttgtgctgcggtaaaagctcaaattttacttaacatgatgtcctagggaacattccccattaggccctaaggatgtaccccactttctctagtgactgctctgatctctatgggtagatagcttttggggataggaatacttaaaaaacgtttttaacgttcacacagttattatacatatttatggagtatagaatggcatttgaatacacatatacaaactacaatggcatctgtaggacaggcatgtcattttcctctgtctactgtacctgtggggaaaacagacttgcaaaccagaagaacgtaggcaggcatacgtacagcttgctgttttgctgagagccccagtaccaactctaatgaggatgcccgtcttcccatattgagtcagagttgagggttgccaaacttcttagtctttgctagtgtgtggtgagtgatagtggttagctccaaactgacattagatgttggtatttctaggaattgtttttgttgttcatgattgctagttatttcgtaagtcacacatgagcgaacagatattcatacatatgtggcatgggagaatctggatgcatttgtgttgattctcacaatctgtatatttttagaagaaaacttagaaaattcggaggagcacagctggactctctgtggtaactatggttgacatttgtcttggcctgatgtctatcaacccttggagtgtgagtagaaaggtttctcttgccttcatggatcttcttggatcatagcttccagttttcttgaggagtgcctcagtgtggccctgaagggatcatggagttgtaatgggcagttgttctagagtctagcttttggcattgttgactagtgtcagtcttggaggactagttttcaccccttagcctctgcttctcaccctgtaaaggagataacacgtctctttaaattgtcaggaagttcaggtgaaaagagtcccagtgagttccctgccctgtgcaggacactggcgaatgtgactgatcaaaggctggaagtgaactccagcagggtggagagtatttgctcctccgagggctctcaaagctgtttagtcccaagggtctgagtcttttctttgttataggcatcctggcatttataacgtctggggtactttataaacacctcgggttgctgtaacttgcagaatacttcctactggcctcccaaggaatcaaccaatagtagtgcttgctatgtcatagaaagttcagcatagcctaattcaggagaaaaattgaaggtagaaggcagaactttctggaagtatgactgtgtattgttgccccatccactcttattgctaggtccatacttgtaacctggcatatgagtaacctgtgaatacacatttaaaccaacttgggctacatattgagactatgtgcttttcaagaaggggcctccctggcaaatttggaaatatctgaatacacttttgttattacaatcgtggggggactgttcctggcacctgctaggttagagactgggattcgctaaactttctctggtgactgatggcagctcctcacagaacacaatctgttcaaatgtcagctccatctggaaagcccaaaagaggacaggagtgattacaaactgaaggtaaggaacctggtgatgggcaagtgtttgggatgtatcaagttgatgatgccacacattgaaaacttacccaaaaggaacttctttggggcttcaagatggactcgggctatgcagagagctgatgtagaagagatgtaagtccatttgtcttgggctatcacttgaaggcagctgagattttacagctttgagcatatggctctgtgttctctggcatcaggtcagttttgtttgttcagagctgaagacagagcctgacccctaactcatgccaggcaagggctcaccactgaacctgacccccaggtcttgttccttttataatgaaaataacgaatatatataatctcaactatcttatctatagtgcattgctcttgctgctatgaggttttgtggattttttagggttttaaaatttgattggtaggcaatagattcatttacttaataaagccttaccaagtctttgcctgtagaaagtccatgaaaacaggatgagtctggttaaagtaaaggcatgaggctagacactgcttttagaggactagcttactcctcattagtctttaaacgaaaactccaggattgtgttggagccagtctgaccgccatatttctaatccactccctttgaagccaggaccttggcctgagagagggaaatagcgactatctatcaagtgtggcagggtacagtatggactgtgtattgagtccccgtcttcatctatggttttcgtcatcatttctacaagagctaagtcatgtacagtggtggatttgctttgagtggattagagtaaggaaatggagtcctacagggaaaggcgagtccgagaatagccaatgagcagtggtaaagcacagataccatgctacaaagttggaaagaacattttattttaaaaggaaggagtcgaatggaaagacagaatagtcaaaagaatcactctatcgttctcatgtcttagtaatcatctttggatgcaagtaacaagttactgaattgtcttattttttttgttttattagattattttatttattttccttccaaatgttgctccccttcatggttcccccactcccagagttcttcaccccatcactcctcccctttgcctctgagaggatgagggtgctccttcatgccccctccccagcatccctcttgcctggggtatgaagtctctacaggattgtgtgcaccctctctcactgaggccaggaaaggcagtcctctgctacatgtgtgcttgggccacagaccagcccgtgtaccctctttggttggtgtcttagtttctgggagttctgtggggggtctgggttagttgatactgctgtacttcctatgcggttgccctcccttcagctccttcaatctttcccctaactcttccataggggtccccgacctcagtctaatgaattgctgttagtatgtacatctgtctcaatcagctgctggtagagcctctcagaggacagccatgctaggctcctgtctgcaagcacaacatggcattagtaatagtgtcagggtttggtacctgcccatgggctggatctcaagttgggcaggtcactgggtggcctttccttcagtctctgttccgtttttgtccctgcatttcttttaggcaggaacaattctgggccaaacattttgaagataggtcagtggtcccttcccttcactgagggccttgtctatctattgaaggtggtctcttctattgtcttatttctaaaccaaagaaagggagttatgataaaggcccacaggacagtgagagcatgacctcaaatggatccaagggcagaactaagagcctgctggcagtgcctctctctcctcacgtttgcttcattctatgttctttctctctataggcaagcttcttttttcttctctgtgtgtataactactccaaagatccctagtttgtgtgttgcaaccagtcctccctgatcatctgtccgtcccaggaggaagagatctgatgggctttaggcatttgtatatttatcacccagtacctgtagtcctagaaacaggtccctatgtttatagatgaaaacaggattatatgtaaaattgcttcttccttttagaaagtgggactaggaacactatctatctagttcctaagtcttaagcaatttttctattgcttccttcatttctgtcttccctgtttgatgccacgaggtcaactctagccccaagtaaagtcagcactcaggcttgaatctgcttatgtctctccctacaatgagaataggcaggcaatttctgcgaccacagaattacttgtgtgtgtgtgtgtgtgtgtgtgtgtgtgtgtgtgtgagtgtgtgtgcgtgtgtgcttgttttaagggaagcgttgagttggatgctctctaagctgtgttctgactcttgtatcaagggagggtttgttatcatccagttatgtcagggctggctatatgtaatttattgcagaattacttataataggaaaatcttccagaatggtctaacatttctccaacaggagagtgattaagaaaataagatatacctataaagttttatcaaaagatattacaataattactaaaggaaattgtagctaataagatctccaaagtgaataaagaagaaataaataatacacattaaattcaaccccacacacatacacctagaaagacatcattgtaaaggtacatctcttattaaaaaaatgaagaaagcagatcaaaatatcacaaaagaatattttggtggtagactaccagtaagtccaactttttgtatgtgttttacttaaatttcaacaatgaatttatcttatagtgctttgttttctatagttggttgtgtaaccaatgttttattgagatagttatatgttcccttgcagttctgcggaacaatacagagagatgcctgccaacattgcctgttcctcccagctgtcatattttatgaatctgacatattttatgtgtttgtaacacacattcaggacattgacaccaatctgtttgacatcagagtcccccggttttccttgatttgagtgcatgtttttatgtcttatatctcatttgagagttccaaattctgccaccacaatcaatattgaacactttcaaaaccacaagaaacctcaacttgctcctttataaccacatccatacctcccatgattctttaatgtattatttatagttaatactaatggaccgggaactaacttcattttagcttttcatctgaagccaaaattctagaaccttagagtaggaaaaagttgtgaaatctcagtggtcacttaaaacgggaacattttcatgtacgaagaaggtttaccaccaccattgcccaaaaccaccaccagacccaggcttttcccgactcctccccagacgctccaacctggtcctctcactctaagtcaggtgtctcgcttatacttcatatcgtctttattcaagtacattcttcatttagtaatggctcacagataaaacactggcctggggatggctcagtgggtaaagtgctagtggacctgagtgtagagttcctgaactcacaagacactgtctcaaacagggtggaaagtgacgacccacaacagaggcggtcctctgtgccttatgtgcctgtggcttgtggtccttgtactcatacccatacctcccacgtatgcctgaggctgctggctctccctcttcttccctaggtgggtggttttagatctgtcatctgtctgtctgtctgccagcctgcctgcctgtctctctctttctcttactctgtgtctcaccgtagagcttgaacctggggcctcaagcatgctaggcaaacactctatcactgaactacatttctggcagctcctgcctgctcttctgcgatagcatgttcgcagtgaggtctgacttatcccggctacagctgcgcttactttgcctagatcccagctctctcccggctccttcctctatcagggcacccgaatctcctttgagttcaccacatttcgtttcttcctttgtgaaggtagtaagacaatgatgagtgctttgagtggctctgagtcagcgctgtgctgtgtgcttgacatctttttgcttcacattgtactttgttatccccagttttaaaatgagaaaacaaagcaaaataaagcaaaacactgagttgagcacagggtggtgtaactaggcaactgcaggtccaagctcagcagcgctgatccctagccactgtccttcgtgcacaaagcagccgagttctctggaaatgccacggattttaaatcttcaacactggctctatgggcctaaagccacgtgcagctctggcccccagcctgatttgaagaaggtcattccttgtctttgatgtggagtgggaactgtcccttcacacactccctgtggtatccatgcaggttgttgctctagactttgccaaaacaaatatctctgaatctatagatccttcctgttgtagccggagaggattgttttacctatttatttcggatgaggaaatttgagtgcagagaggaaccccgttcaacttaccacccttgggtgacttgcaaccttatcgtgtcttcctggcttacctctgccatctctccagacctctcctgtgacgtgggctttcttgacctttcgtcactcttgtcattctgtagacactttccagcctttgggtctgacctcaattgtctaaatttgggtcggttgactggagtcctagagaaattctacacgaaatgcgagatcctactgtgtgccaaggcagtgtcacaaccattagctacgcttcgcccttctccgcattgtctaatgtaggcttgaccgcaagtagcaaaaaccatcctgattatatcttgaacgaaagtaagtttatttctttcttatgtaaatgtctgatctgaatggtgccctagcctatgaagctggaagggtcccaaggatgagtctcattaacccagaggctgtcactttcagcatttttacctaggtggggcagccaatgtgtttgttatttagacagtgtgaaatcaaaaggggatgatacaattcctctcacctagaaacagcttgcaaattgaaagcttacattccattggtaaaaatgtaatttgccacagcaagtcaaagggaaccctgggaaatgtagtcttttattgcaggaagccacctgacaaaaatggatttgggttagaagtctcggctatatcctttttatgccagttctgggaacacaggccctggttgattgatagaagaatcagttctcaggcttatggagttctagaaaaagtgcaaaggggccttgtagaaaatgtcaggattccacaaaggattagaattcagaataatttgtgaggaggttggaatgttaagaacacctatcatttatttgggacttactatttacttgctgggtatttgtttaatacttaagatgcattatttattttttttagggaaatcctagagagtagctgccattttaaccctcaacttacagatcgaatttccatgagaaatcaagtaaatttccaaggtcactaatcagggatatgaagaaatacctgtgtgcttattaagggagcctgaggtcactgcccacttactctgatgccagacaactcggaattattgctcattaacacttcagaaagcccttgtgttcccacaatgattagacccttccaattataacttgaccaggagatgttgtttaaatagtttataagcccaagttgaaaggtcatgtcttctatttgccctgtttgctgagtgtgggctcagatgaagtgaaacaagaccaaattgacaaaaggatgtattatccttctgttccacttgtgtacacggttccttgggatatttttctgtaacaatgttttgaattatattttatttatgtgtagggtctggtgtgtgtgtgtgtgtgtgtgtgtgtgtgtgtgtgtgtgtgtatacatacgtgtgttgatggcatgtatatggaggtatggacaacttgtagaagctggttctcttcttccatcatgtgatttctggaggagtagaactcaggttatcaggcctggtgacaagcacttttacccactaaaccatcctgccagcctgagagcttcctttgtgtgtgtgtgtgagaaaaccaaggctaaggcatctcatagttaaatgaagtagagttgggatttggccacatgttggtgtgatacaaattggaaatcatagtttgctggttgcctcatgtccattatgttagtggggatagttttatgaggattctcagtgtgtcctgggaccaggtaccaggcctattgctggaagatcataggctctgattattcatagttttatttgatgacagcttcgatttttaaattttgtgtctcttttttttttaactaacatggtaggtgggttatgaaactaaaatcaagaatggagtactctatgatgaaaacatacctttatgtaaactggcttttccaacccaaatcaggattaggtagtccttagaaggggtactgaaaagctagatgttgcagaataacacaagtctgtgtaactgctatgtaaagcgttgccctttgggtgtggtgacatttacaggggatctgctgtaggtcaggaaggatttgaccatgcaaagagccaggaagaggcccctgaaaggaaaagcaaacacagattcctaggagatgggaaagagaccagtcactcactgagagttcgagacttggattttagagctcatttgttacagaacaggagctgagttactttgcccacagcaccctccacttccaagcatcagtggctgttttgggttatcttccgcaaaactgagagtcaatgctataccacacttgtcaagttctactttggaactatttggaagaatggccgtgagctgccttgatgaagtgctgctctctttcactcaccttcacctgcaggtgattcactcaatgatgttcctttggggcgtctttttggggcctcaagggtctctgactataagaaaactgtgtggtgctttcaatattggtaatgttttgtaaaaatatttggattcttgtttccatttaaaagccattcaaagagttagtgggtggaaattaaatgatcccatcagaattctaaacctagaatctatagcaaactcagagggttctgttgacagaggagctgagctgttctgaaaacaagggcggattctttcatttacaatgctgcagcctcacagatgtgcatggctggctgttggccatcaataactagcagattgggacattgtctcagtttgggcacttggatttttaatctaatgttaattcagctgttcttattaaggatttttaacaaaccaacaggctctttaaaaacaagcaaaaagaacccaagcctaaaatcaatggtagggatttaaaaggacattccggacttgttccttgcaggggctcagaagagagccttttgatgtgtttcccagtacaatgaaaataccagctgggtaggatgaagagattctcaggtagaacagtgaagcttgagggagctttgtcttctcggtgtattactctttggcagtgagcacactaaaacacccatgtcttgattttttagtttataaaacaatggatatcatttcctatcaattttctagctgattcatgagcaatatatgaccatgttctcttgacaaggaaatcaggttcccaagggctgcccaaggtcacagtatggcggatgatgcagttaatagtcccacccaaatgccactgtgcaggtggttggtactactgagaaacagaacagtgttatgacatcgtcagaacaatgacttagggccttttcagaatgtcccacaaaccagagcaccttgggattatttgatgtttccttccagctttagtctccaatgttctcttgtgcctgagtatgttatgtcaaaggcagagcctagaaaataattatggtttgtttgctatgatctttgaaaatgagaagcacccttatgaagagaaatagccaaaaccattatacaaaatcaccaagtcaccttaccaagataatttctcagacagcataattgagagaaatgtgataattttgttattagggtatgtaactatcacttctttggagaacacaatagcaaaaccatgtcaaaagaaaaagaaatttccagaacactattatactcccaaaatatttaaggcagccatgaagactgtaaacattagatatagccacatttgaaagtggaactagaacacaggctacaaaccctctaagcttgatggcctcttgcaaggcggcagagtgtgttctttttttgccttttctgggcaaagcacagcatgtaaggcatgctacatgcataaccatcatggcagaagatgccgcaagatgcccctgccactgtggagaacgcttgagcaagtgaaaggctctcaaccttcctaatgctgcggccatttaatacagttcttcatcttgtggggaccctgatcgtaaaattattttgttactacctcataattgtaattttgctactgttatgagtcataatgtcaatatctgatatgcaagataactgatatgcgacccctacgaaaaggtcatttgaccccacccccacccccaaagtggcctcgaaccataggctttctaggagaaagggagagtgtgggctaagggtggtttccatgtggtttcctggggatgcaaatggctaaagaaggataaacctgtgaatttcctggaaagagattggtgaaataagatgtgtgatgggtagactggagagatggcttagtggttaagagcactgactattcttctgaaggtcctgagttcaagtcccagcaacaacatggtgactcacaaccatctgtacagctacagtgtactcatatacataaaaataaatatttttttaaaaagaagatgtgtgatgtgcatgactgcagcctccatgtgcatgtggaggggcccagggaaggctacagaggctagatagctggggccagatagctggttagtcagaagttagggatggaaaagactaagactctagctgggagtgggtaggtagaactggaatggcctagactgacctactggttagcagttgggtctataaacatagagagggtttggaatgggggactgagtggtaggaggtgtggagagagggaaatggcctggatgggggttctagcagtggtttttgtatatagcatacaagagaaaggtgagttggggtttggattttctgtgaacatatgggaaactaactcttgggtttccctgtattttcctagtcttgtcccataacttatctgctgtaggatcactgtccttacagggcttaatttaaaaaaagttattagcatatattagttatatatagtggattccatcaggacatttcaaacatgtgtgtaatgtgctttcatcttgttcatcccattgttcctttcttgtgtccctagttcctggtgtaccacttctccctattcttcccattgtcatttttccttttctttttctcccccctttctctttatctctccaactcctccccccttactcatgctcctgagtgaggggtcatctctcaggagctccttacacctgaagaaaatgtctctccctatcattcactgtgctatcccctcagggagtgatgagttcccctggccgcctctccctccgacaggatgttgacagaccaatcttgtgcagatcttgtgctgatatcacagctgccaggagtcaaagaatgcagtggcctcatcactccccgaaggaagccttccgccacactctgccgcttccaccttctgcgttctttttgcctcttcttctgccatagtgtctgagccatggaaggggctatacagattcagtttggctttcggcaatcagttgctctcagcaccttgatcagtgatgagtctctgccataactgctgtccactgcaaaagtgaacctctgaccaaagctggcaacggcactatgggcatacacaaaaatattcataagacagcttgacaggctcttcttgtctagacaaaacagcaagtagcaggttctccctcaggtccgtgactttcccagccagaggcttttgtcgaagcttactgtcccggaagtgttctctctcccgtcgagcaggtcgcaaatccattcatacggcattcacttgctcccgtaacacccttaccacgatcatgctagtaggccttctttcatagctggtcagcagtgtaccttatgtcatctacaaggaagcaagagtggaaagactttcccttcagcagtctgtgttgcaatttctggtgctagtcagcaggcagggagcctctaactcggtttcagcttgattttttttttttttctactatgtcttggaaccaaccagtgtctttagcaatagtcttaccagtctagtgggcagtcagcagtagtggcaattgcttgcattgttgtggaaacttcagttctctcctggaccaacaggccatggggatgtgggttactactactcaagagcaagttttcagctctcaaacacattctttcctaagacccactccgacgttggcgctggcctgtgttatgactgttagagatcgtcttaaggttgttactatagacaggcccagaccattgtgggtggctttgctccctgggcaggggtggggatcctgaactataagggtggagaaatgaagtttgagcaggaagcaagcaagtgggcatgttttccttcgtacctctctgcttttgactatgaaagggatgtaaccagctctcaagctccttctgctgtgacttccacaactgtgaactgaaataaacttggtctcccccaggctgctgtttgttggggtattttatcccagcaacagaaacaaagctagaacagatgggagacttcaataaggagaaagtcttcctcatcagatatttgagcagtttatttaagcaaaattataaaattagcagggggaaagcttgattttttttttacatcttcaaaattaaaaaacaaaaacaaaaacagatttccttgtcttttgcaacagtgtctgagagtctctttatcttactattactatggatccatgttttaaaacataacacctgttttattcagcctcagttaggactttattgatacttacaagggctcctccctggacagtaggagccctttctgttggctcctagctctactgcagtcttccctgatctctgtagctactccgcctctctgaggatcaaccatgttttcaaagagcccttgtttcttttagagggaggtggaattttgaggtcacagtctccacggagggacgcttgctgctcctgggcagcagtatctaggcttttcaggggacagcactacaaagaactttctaagagatgaaatacctcatggatttctaatgaggtagttttcttttatgcctcatatcccaaatcttaattatagctatataactacttattttttttatgcagtcacacacagtgatagaacacagtagcggttcaactcaagatcatttaaaattgcttcatactctttgggaggggtcagtggatttcattttagcacattatttaatcaagtcatctgagactgtttttctgcacggttatatcatccacatgtacttacagaactctttgtttcgtgttgcttttgttttggggagttactttaaaacttacatttataatgatatagaagggttaccatatgtatttccagattacaatttgtatgacaattgtattaaagaatcctggcttatggcagtctccctaccctgttccctgtcttctagatgactccttttagttagagtatgtcttttcactgtgtaaacacgtcggctcccatctcctcgattccttttagataatggagatgtctgtatagagttgggttgtgcctagcactccagggtgaaacaggcagtattttctgagatgttggatacaagctatgagaatggcatcaaggttgatacctagcggagtgtgctgattgattgagagactctccatctttgcaatctctagccggctgtccttgtcctcagatgccctctgctgagctcctctgataccccaagcacaagcactgtccttcctaaatggcatatgcgtcttgttttctttatgtttctcggtgaatagattatgcaaagcttgagggcagcaaccatgccttctccttctgttttcccactgcctcccacagagtctcgacactggaggggctcagggatgcacacaaatcaataacaggcagctccaacagtgggtgcttctttttctttgcttgtatgtgtgtaggtgcacacttatgtgagcacacatgtgtgcaggcgcgtatgcacatggatacagaggctgatggtccaccttggatgtcattattcaggaaacaacttttttttgcctttttttgagacagggtttctctgtgtagccctggctgtcctggaactcactttgtagaccaggctggcctcgaattcagaaatccgcctgcctctgcctctcgagtgctgggattaaaggtgtgcgccaccacgcctggctcaacttgttttttgagacagggtctttcactaggttggtgctcattcaataggctaggctcctgtttgcacctccccagaactggtgttacacaactgtgtagctaacatgactctcgttatatggattctaaggatggagctcagcgctcaggtcttcatgatgcacagcaattacttaaccccaccccacccccagctgccttccagcccagcactggtttcatagacatgcacttgtctctgattctcagaatagctcctggaggtagatggtgatatcccatctttcaggccatgtaatttcagcccagaaaggtttaccctttatataataaccacaataataaccacttaacctctaagggtaaggcacatgtccaaccgaagagggccagcagaaacaaacccaactgcgtatttggaggctctttgcctcataatgtcatgtcaggactttttcctttaaacaaaactctgtgtgtgtgtgtgtgtgtgtgtgtgtgtgtgtgtgtgtgcgcgcgcgcgcgtgcgcgttattctttcatttaacctgtcggtcctttgcatgtatattatggcttccttccaggtttgtgttcttatgggattcttgggtgtaagaactagtgggtctctgttcctcatgacttttttttggggggggcgggggggtgtcttttccttttgtttgttttgactaattctgatgtgttagatttttaaaaattttattactattattatctcttagaaacctgattgttttctattcagagacagaaagggggtggatctggatggaaaggggtagggaggaagtgggaggagtagagggagggaaaaccataatcaggatatagtattcgaggaaaaaaaccctattgtaacaacaagaagaaaagaaggaggaggaggaaaaggagacggagaagaagaagagaaacaacaacaaacagctacaaagtgctgagctggatctgggcacacactgcctgacgccaaggctgatcagccctgaccgcttcccatacgcttccattcacgtggggtggagcagagcacatttgcctatctgactgctgtgcacacactttgcctttggcactgtattcatcctatccatcttccaggagttacaggcaagatgtctgtggttaaaggttgcagtcagggccactgggcagaggtcggtcagcaggcagtcagttgagggcaatgccaagtgcagagagaagacagaaggcacttacagctagccacccgttatacaatagtcatcaccagggcctcccaagcagagggaacaaaacccgtgatggagtcatgcatgttcttgttctacagacaatgctggcattagtggcaagtcaaaccaataccacatgcactttggtgatgtttctatccatacttgccgtgtagttaagtcacgttttccttgggttatatagtctgagactcacaggtttgctaggtgttgggggcatcttggtaagcagataattaagttccttttcccatgcaaagagtcatttgcttcagggccctctggcatttgggatttggatctatgaattaccctcatgggtcagagtgtggactcagtgtctggactcaggcctgagaggggtgggtgtctaatgtggaagtgttggaaggaaggctggggctgtgatattatgctggccctgtgcttggcgaggccagacttctatcagaatagtgatgatggctggtaataggttttctctgcggacgaaataagccaattcaagccaaattgcaaagtacataaagatataaaggcaagtttattgagggcagttcttgggcagatatcacacgaggaggtcagggaagtcgccatgcagacaggaagacagaggagagggggaggagaaagaatgaacatgtatatgctgggcaagagacatgcagagagggagggagagtggtgggggcggagagcgccaaatgtctggagtgtatagtgaagagacttttcagagcccagtccctggtctggaaggttcagggtagatagacagatatgctagccatgtcctgtaataggcagagacggaggccaggtccaatttggtatggtaaataggcacctcagctcctgtccaggctccaaaagccaacagctggtgaagggaaagatggacacttccctttgcagccatttctgctatgtgattcatcttgtgcactgtcttctctgcatccatccaaacatagctgacaactatggcgaggcctgttcacgtccctctgttaaactgtgtgatagcaaccgtgtccacacacggtttagagccgggcagaactggatctgttctgaccctgtatttcttagatgtgcagcctttatctaattatttaacttgactaactctcaatttcctcctcatatatcagacgtgagatctgcctcggcagggtgttgtaaggactagatgtgatttaatgaacgtggcagatggaaagtgcgactaaacgggaagtcctctgtctctctggttcccactggaccttcacttagggctggctcttcttgctaacgtgagatgccagagctgaggctgtgcaaccatgcttccctggttatcagtagcagacagatgagattagaacctcatctgtagaggttctaattcagaaaacatatggacacacacaccctataccacactatatcacacacaccacacacacatgtacattacacccctttacactcatacacacaccatacatatatactatacaccatacacacaccacacctactttacacaccatggctgtgtacatgtttacaaaacatggtttccttctgttgaaggacactgagtcttaccataaacacacacacaaatacacacaccgcatacacacactatttagaaacaaaatttcactatgtagcacaggttggtcttgctcttaatacctagccacaactgagccccttctgcctcagcctcttgaatgttgagattatgggcacccccaccctcgctcggtttagctttgtttactctggatatttggacacagtggcctggcttcattaaagtcaggtcatctggagtcagatgtaatccttgatcctggcaactctttgctcatttgcttgtaggcctcttggctcagtcaggctctatagcccctcaccccccacccctgagcttagtcttcacagctataaaggagcggtatgacctttgctgccaagcctttgaaagcataaaggaagatgctatgcatacagcttcttgtcctacctgtcgcatagcaggagtccagggaaggttagcctccccagaccaccatgcttgactgtgtatagtcatattcacacataggctcggtccataggaatggaactgataactgaaggtaagggctgtgtcaccctccttcagtgtgcacacaggttctgtaaaaacatgacttccttctgttgaaggacaccgagtcttacaaagtgcctggcaacccacgcttgcctttcttcacagaggacactgtgcaagatggaaaggcatagctttcaaccttgcctgctgtctcctttgtgctcagacccctgttgtggttgtcagtggcagcctttgaaatctccgagtctgtgaatcctggccatgttacctgggatctaaaggtaacacagagggagatcagatccctctaatgacgcaggaaacttttcagtcacagtcaccttcctttaggaaggctttgaccttggatttgtcagtgtcagtgtgcttttctctctcaaagggatttgacagtgagcagtctccaaggcttgcagaatggttctgtggggagagggctcatccactgtagcttgctctctgggtccttgcccttagccacctatgtgctgccgccacactgacaaccttcatgcttgcacctggtgaaagtaagactgaaagcctaaatagatgctgaccctaaagacaatgtgctgtgtgcatgcgcgtgtgtatgttggggcatgaggaggttaggcctaggcagctcaaagaagctcatccagaaaaaccatcctgccttgtaccctatcccttgtgaatctgcaggagggggcatggttagactcccctccttctcctgcctattaaagtcctagctgtagttttcactaatttgtgtcttccttcccagcctctgatgctcagcagctccccccatgctgggtgtctggtcttggaagtattcttagatcactcacaccaggctgtgtctgcctttccacttgctgggagacctgccgggcttgcttatttccctttgtgttttagacttttaacaaatacatgggaagcagcaatgtcatgagaggagctcaggagtgagatatcatggagaagaggctagggtgtgtcgcctgtggttttgtttttatgtcctgcttgcggggaactaactatttgtgctccctgaccccccaaagttgtatgttgaaactgttaggatgtagtgttggacatttggagctgaatggatcatgatagcagagttgaagaattggtgtctcgggcaagagatggctcaatggttaagagcactggctgctcttccagagattctaggttccagagattccagcacccatagaatggctcagcacccatagaatggctcagcacccatagaatggctcagcacccatagaatggctcagcacccatagaatggctcagcacccatagaatggctcggcacccatagaatggctcagcacccatagaatggctcataggcatctgtaaatccagccttaggggatctgattttcaattctggcctttgagagaacagcatgcttgtggtgtacagacatagatgaaggtgaaataaccatatgtatgtatgtatgtatgtatgtatgtatgtatgtatgtatgtatatgtgcggatgtataatttatgtatatacatatatatgtattattatattatatataaatatattgattttaaagaaagagactctagaggattcattcaccatgtgaggacacagggaaaggttcccactgtctctcaatatagtttcccccgatcttatactttcccgcctccagaactgagaggaatgtaattctgttgtttgtagggccctggtttatggcattttgttatatcagctcagatagcttaagacaggccctcagtttgctcttctttaagagagaatggtaaagtttaacctgaaaaaaatgtcatgaataatggatgtaagcctgtggttgggacacacagagaatgtggttgatagacaatggccactgttgttagcacagttatacttcagtgtgattgcagctgtttcgaaatgaattgaggggctaggaagatggctcagctgataatgtgcctactatgcaaacagaaggtactgagttcacattcccagctcctatataaaaaccaggctcagtgtcacatgtctgtaactctgagttctgcaagacgtggagatggggaatccccagagctcactggccagcccgctgagccaatcagcaagattccagtgcaatgagagatcctgcttcaaaacactagggcggggcggatgagatgggcctgcagattatggtgtttgtttccaagcctgaagacttgtttgatcttcaggccctacatggcagaaggagagaactgactcttgtaagttgtcctctgacctcttcatgtgcactgtaatacagacattcccacctcatataggtaaataaatagataaatgaatgaatgtaatgaaaagtagagagtgattggaaaagatgcccaatgtcacctctggccttcaaatgcaagtgcacacagttgtacatttgccacagaaaaacgtacactcacaagagaaaagaaaggaagagagaaagaagggaagaaagaaaagaaggaaggaaggaaggaagggaaagaaaggaaggaagggaaagaaaggaaggaaggaagaaaggaagggagggagggagggagggaggaaaagaaaggaaaggaaaggaaaggaaaggaggaagaaaggtgggttagagctttggtttcttgccgagctcagctcagttcagtttaatgcccttctttggactgctcattctgggaagtatagtgctggatgcattctatccatcatgatggatataatccattcattcagcgcttcttgtttcttcttaagtttgtcttaaagctttcatcagagtcatctccataccttccacagcggtttcaaatactgcctgtctcctttgaaggtcagtttgtccttacagcctcttaaggctgaaaaccaccgagtttcctagtctcacctctcatgcctcgaatacatctgaagatgcccggttctgtgaagaaccacagttatgtctgggttgcaatctgtgctgaagacagcatgttacatatgtgacccatcccctaggctccagccttcctccctctctgggctggtttgtgtgtctctgtccccaaaccaggcacaagctcactggcagacttcaggaaacggaagagatactgggatcaagtcaaaggtcaagcagagacagatgcagccttaagctcaagaaggtgctgggtgtaactgatttttctactcctttgtggtattgtttttgtagtcagtcaggttgcagcatgtaccaaaaaggtcacacagctctttcttccatcccttaattttggtaatgatagctgatgatgaaaaaaaagtgaatatggcagataatttattgagcagtgtgtgtgtgtgtgtgtgtgtgtgtttcattattattaatacctaccatctcaaagcagaggttcaaggaggttacacatcacatggttgagcatgaagaaaacagaatggttgaagtgatgatggtggacccttcagagtgtgacttcagcctgatctgatggttgggtacctaggatgctgggaagtaatcaatgacctgtctttctctgcagggctcagtattgggcgtagttgtcatcggcacacatccgttatcttgatagaggtgagaaaacaggctgcagaaaatgtaatccagatggcgatgctatgcctagaattcaattaggggcatgatttccaattaatagaccttcgtgtcaagattgaggtcacgtcgttaatcttgcttttattttaggatttccactgtcatgatttacagctaggctcagccagccttgtcggggttattcgagcataattaaacagggaagacagccagatcagcttgctggtgaggagcagggagagagactgttgtttgattggtaaaggggctggcaggacggggcacaccggaggattccttcttcaggaccattttctgaggcagtggcctcctgcatcccaggcggtgagctctctaagtactgtctggtccagccagcactgccacactcacgtgcagttcaaggtacccttggctgggttgtaaatgtcgcagacagtgtgccttttatgtgtgacggggtactgtgaggtgctccacggggaagacatcttaggcttcctctttgcaacagtcacacaaaagccaagtacacttcccctcccccgcccgaaaaaggatgaaggatgtggcggttctgtgatgtacaccatgccttcatttctttccaatccttgtggtgtttctggttttcctctttgtgtctattacccctgcccaccacttcccacacagtattaggtaggtaagcaagaattacatgtgatgctttttaggtgatggttaggttcatatctatcttttcattagttccttgtcatacacatggctggaggatgccatgtttccagtctgtttgctcacaaagcatctcttcctctccctcccctccccccttcccacccttcccccacttcgtctcactcagcacagggtctccctttcaatccctccatgttcccagcatcccagtgcttggctaacagcaggtactacccagcccagctcgcctagaccctctccatcagactatgcctgtagcaaatgccttttctcttttcctggttatcagggagctgccactggagctgaggctctttgggaaaagtagcatggagaatgtcggtttttgaatgggaagggcctagagagagggtaggaaccacgtgcctgtgatccagcaggagagggtgtgccaccggctgctgtgagtaaagttgaaacctggctggctgtctactcagtctagctaagcacagaagtgcaccagcctgctctttgacaggatttgctcagcgacaggtgtgtccacacagaggagataaggttacatttattggagtgtttcatcaaccacagccatgctagaagttgggcgaacagataatggtagttttctttgtcattgagacccatgaaatgaagcactagccagtcaccttaaactttttttagttacagttatctatgtgtgtgggtgcatgtcaaagagtgcatgtggaggtcacagggcatcttgaggtagagtcatttctcaccttctgccatgtgggtccccaggatggaactctgattatccggcttagtggcccgtgcctttacttgctgtatagccggttctgtttatagttaagtagcagattttcttccaagtgcttgctgtgggtttttttcctgtctgtagattcatcttctgacctctcatccttcctgtttagtcagcacttggctgtgttctgcaactcaccaatcctccctgagcatttttatgtatccgtatgagcaaccacagactattactgggtccaacatccacacttatttttgagggagttagatgctgaaaaactgccttgaaatttccttcaggtgccttggggtgggattgtggcttttgaaataaacactaaagcaatggctctcaatcttcctaatgctacgaccctttgactcaatgtctcatagtgtggtgatccccagccataccattattgtgttgctacttaactgtaatttcgctactgttatgaatggtaatgtaaatacctgtattttctgacagtcttaggtgacccccgtgaaagggttgagaactgctgctatccctgggaaaatctccctgtcagaaaaacctactgtatgaacagctctttggaaatctgctgatccttgtattttgccattggtgtgtcagggcaaggaccaaactgtacaagcagttacacagagtttgtttaaaaattcacattctttatcttgacctccaagccctctggaacgtaagggatactcactcaccctgtttggtggtataagttgatgtcctaaagtttactaatttgttcttacagttttcagcctttgttttcaagacaggatcttgctatctagctcacattagccttgaaccaacgatcctgtccttctacgtcagaggttctcaagctgtgggttgtggccccctacaacatgaggaaccacagtacagggtcgcagcatcagaaaggttgagaagcactgttctaagtgctcatctaacagattataggcacatatcacagctaccacctctactaccctcagttccctattctgtcctcaagtttatttaacaaaatttccatccctattttctactttcaattctagaatctcccctctccctctcctcccccatttctttttcaagacttttttctcttccgttctctaaagatatttatgaactttaaagtatatgttagctaattccaacactgggagcatcttacggtctatttcttggagctttttttattgccgactgactaagctcaaacagacaccacatgaatagtgtttcacgtgaggcttcattgggtagagtttgggttgccagttgtagcctggtttcaaacttggggctcgatgtggctttcatccacaccatatttcttctactactactcttatctcttccccatccattgccctagatgtcttggaactcactctgtagaccaggctggcctcaaattcagacatccttctgcctctgcctcccgagtgctgggatcaaagggataagctgccatgcctggatttgtttgtttggttggttttttaaaaatttaatattgtagatcctcttctgaaagaatggctagtattggttttcaatgaactcttcctatctattttatggtcctctccatcaaacattagtatcccatatgtttactgagcccttactgtgtgccaggtcctctatgcccctagggagatgtgaaaaagtgtgaaactggctctctgttactggagtgctggaggtaggggagttgagtcaattttatgcaaatcagtcctctctgagtcctggggtggagttgcaaagtaatgtgggaaatggcatggggggacatgagagacaaagacactcacaaaaggaggcagggttgggaggtaggtaataactgaagcctttggagccaaccctctgtgaggttctgtcagtatcattcctaaacctaagcagaggccagcttttcctacagagatgctgttttctttctgatgctgtgataaacctgaagtaatgtgtcgaggaaagggtctatttcaactttcagattacagtctatcattgcgggaagccagggcaggagcccaaggcaggaccgtggaggcaggagctgaaacggagtctgtggaagacgctgcttgcttgcttctggttcacattcagtgacccaggcccacagtcctgtgaatgttcccactcacagtaggagtactaattcgcaatcaaaacaatgccacaagagttgtccaaaggccaatgcaatgaaagcaagtcctcacccgaggttccctcttcccaggtgtgtcatgttgacaactgacgcttgactacttcaggtgcttatgcccatgtgcatactatgagggtctgattttgtagtttatggaaacttcttaatagagtgcctagattagctaataggaagtctttctattataatatattataaaaatgatgccatcaaagggttttggaactggagaggacttaggaaatcatgcaattcattcccatagtttatattcccataagtcacataatatttcaaaactggtgatatcaaatccatgtcctagtgtcaaatctgaatgcgagtgttctaccagtagcttataatatgtgccccatgccagagctctacaaaatggcgagcagaacctcagagatgcagaaagttctgcttctgtgaatcggtgttgcttctgaatcctcgcagtgaagacttcccatgcacagcatctagaagttccctgctgtatcactctccagtctggctgttccagctatgagtcagaacaaagtggccctttgtgatgccggctgcattggtcatggctttctccacagcctctgctcactgttatttactgggtgctcacaatatggctgggcgtcagctgagagcagacgttagctcccacagtcctcccacagctgcacgtgggtgcttctttcccgagggtcaggggactgttatatagcagctgtaggctgcatgcccttctagttgcaaagtaagatctgaacctactctgactaataagcagcctgcattttaatactgacagctttgttgagtccctgcctccttgtttggcatagggagcatcaaatactttttgcacaattttacttatttatttttctatgtgacaaactcatgtcatgtgcttagatgcctgtgctctctggctgacttgctgttgtaggcaatccctggcatcacttactataatacctgaatttctaaggatgcaatttaaaatttctgatcgtgttaaaaaagatttattccttcaaatcgtcaatatatgtggtctccttttatcctattgataatatgaggcatgcaggaacgtttttgtttcgagttggtatcattggaagggaataaggaaccctaggggaatatgatgatatgctccagcttatatgggctttgagtaggaagacccaccctcaagtctaagccatctttccccagagttcatattctccccttgaaagctccctggagtaggctgaatggggagcagtggttctggaggccaaagcagtaggctgtttaataaggagtcttattattatgcctacatgacctatttgtttaattgttgggaaatcaagactgaaatatctgtaccttgggataaggaagccttttgtggcaacggcactggactctttgcctttggccaagcttagtagcgaaggcatggtttattgttgggacaggagctggcagtgcacgccaaggtgctttgtggtcttggatttcatccccacacctaccaactttgtgaatgtcaggtgacaagtgtatcatggtcacacttacacacacacacacacacacacacacacacacacacacacacacaggaaaatggccctcgtgaaacgaatgtgaacatgaccagatttctattagtgacattggttttatcagtgttacctaacaagctggctggccttgaatggtaacagttactagaaccagggatagaactttctggaaagaagacagatggaagatgctggggaagtgtctttgtggaagactggaagacttgctgagggggactgatggccccaggtctgtgattgttgccaattgttccctgccattacttctctatccttaaggtcctggactcttagatggaatctcagcagaaggatgctcagcccgcttgcagttagagagccataggtgcggctagaaggttggggtgagcagggttgcttctcagaggccattgaaagacttctgttagaactgttaggcgcagaagggccccacagttgtttagtaggcatgtactgagctatagtagtaaagcacttggttattgttcttactttatatgggctttttaactgtgaagctgtgaggtatggaaaatctagaaaattcagtcatttaaagaccccctcccccccaaaaaaatcactttataattcgatgtcttttgaaaatgtagtgggtaaaaggctgggctctggaacagtgtggctggctgcaaaccctagcacagcggccgtgggagcttgggtaggttcctggtgggtctgtaaatccgccttcctgtgtgaatgggaggaagagtggagcggcctctggagtaatgtgaagattagtgtcactatgaacttgacatctaggtcagtgacaggtcataagaagcatctcataagactgggctagcattgctattcttttacattaattataatatatgagtggctgtggtgtatatgcctataatctcagcactgcggagctggattcttcaggaaggagtttcgggtcaccctcagctgtacatggagtccaaggactgcatggattataccacatcctgtctcacaacccccaaagtatataacacttctgaattctttctctacacttcagtgtttaccagtattgcatataatgtttatattttggttttccttttatgattagttgtagctgtctgtactcttctacaaggtaattaaatggttaattatatgtgtgtatatttatgtatatacacatataattataattagcatatatatgtatatatatacacacatacatacatacacacgtaattatagttactgaatagcagtattaggaatactcaattaatttctttaccattaaaaatatatcatttggggctggagaaatggatcagtaattaagagcattggctgcccttccagaggatctgggtttagttgccagcacccacagaatggctcacattatgtagccccagttccaaaggctctagtgccctctgctggcctccatgggccagtgggcatgcacatgacactctggtggttgagtgataatggcccccataggctcatagatttgaatgcttggtctgcaattggtgggacagtttggaaaagattgggacgtatggccaggaggtgtgtcacagggagggtgtgtgtgtgaggtttcaaaaccccacatcattcccatagctcacttgctccccccacaatccccttcatagtgttgtctcactatgtggattcttagctactgtaccagtgttttgggaaatattaaaaacaacctgaaagttcctgtgctatcaccgggcagagcatcggggccacatgtctccagccaggtgatctctgcagtgtctctgggctggagctcccgagttcctttggtggatcactgcaacgccagcctcatgcaatgaccatccatcctgtggtcagccgccacaacacccagcaacctggtagaaacacaactcttgatgactggcaggcttccccagctactgccagcaactccctgcccatgggggctggccggccatgcactagtggaaaaaaaaaaaaaaacaaaaccctgtttttatctcatggagactttgtctcagaactccacaatgtctccacccagctcactaggttcccactgatgggttgctaccatgccagcaccatgcttcaaatccaccacagcctttgtggtgcacatctggcaaacccacgtggtacctttctctcttgaacccagctgagccttgtgaaggaatacacaatacaaacttagttccaaaacaacagtaactcaatcgctgggcgcaacaactaaagtcctaatctagtaagacttattaaatctaaataatatggtggcaaatcctgacagatccaacattgaaaccaggagacactcatagctacatcttgtcctcacactatccccaaccaaaggagacctaactctctcctgcttcctctcttcctctgttcaacccgaagtccctcctacccacccagtgattggctcctttattcattaggggattggttcacaagaagtcccctgagtatgcaacccctcctaggagagcagaattagcatcaaaatacaaacaacaccaggcccatccacaccataccaggaccacgccagcctgccaccatgtttctcaggcatgatggtcatagactctgctaccctctggaaccatgaaccacaaactaagtgctttcttttataagttgccttggttatgatgtcttttcacggcaacagaaacataactaaagcatatctatgcacatacaattaaaaatatgttaaaatacatcatttgtagtttctggtcactcacaacaatactatggtcagtatgttttatttttttgcctctgagtcttttcatggtataatactgcatggagagtatgccttcttaggagttaccaagtaagactgcacacagttcagagtgtgcaggtgcactgcgtgaactgtgggtggcagggggtgtggtgtgatagtgttccctatgggctgtgaggaccttgtcaacattttccatctccttctttggtgctttgactcagttattacaggtagatatgatgcccattgtcttagttagggttttactgctgtgaacagacaccatgaccaaggcaagtcttataataaacaacatttaattggggctggcttacaggttcagagattcagtccattatcatcaaggtgggaaaatgacagtatccaggcaggcatggtgcaggaggagctgagagttctatgtcttcatccaaaggctgctagtggaagactgacttccaggcaactagagtgaggatcttatacccacacccacagtgacacacccattccaaccaggtcacacctattccaacaaggccacacctccagatggcgccactccctggtccaaggatatacaaaccatcacacccatgaagggcagtctcacctgccttttctacctctcttacttggcaaggcagtagggaccacctggacactgtgccagcctctgaagggtatatttttcaaatggatagtcattgcctccagttttccttaaaaaacaaaacaaaacaacaacaacaaaaacaggttaacgctgatgggtgaacagacagtgagcagttcagggggaggtatcctctcccaagactcacagtgttgtaagaactggtcaggcagtttgtgtgccggatacaatgtggtgatgctgctctcctaagtgctgataatccccagggaaactaatttcagacattcttgggagttacacgtaattggttagtggggaggcagggtatggctctgacatgtgtcttttgtgggcttaggttttaaaaagacaaaatgtcatagataagagtctgcctggagttgaaacagaggcccgggcttttctccttatatggtactcattcactctcacttcttaccttggtacccgcttccatccttggatgccagaggaccctggctagcatgattcccataggtagcatgtaaggtggataatctagtacagagaggttaataaacttcctcgaaaagccagctggtaaatattttaggctacatgggctgtcaggtgtgtcacggccgcacagctccatcatagcagcatggaagtgccactggccagacataaacacgcgagtctcactctgctcttgttttctgtgcatcccatgcaagtgatctaccattaagctacaactctagctccgaattccaataacgttttacttccagacattgaaagtcagccttcagaaaactgtcatatgatatgaactgatgtgccttttaactcttctttcccagacaattaaaatatagggaagtcactggggtttctcagactatataaagacagagaagtgactggaattgccagagctcagtcttgctgtactgaggctactgtttgtttgtttgtttgttttggttttctgcattgtcactttccaaccatgtcatatagctctgtgctcagttaggtttttaaaaccttttttcactcatctagtggagacaaaaatacccttcgcagaatctttacttttgacacccaatgttcctcactaagaaaagctggcatggctacccaaatgagccattatggtgaaagaaatcacacagcgtgcctcctgccttctgtgacatggcttacgtgctgtggttcggatgtatgggtgttataaatgaggtctggaaagtcattctggcttcttcagcattccagggctctaatgagcagagtgagatctgagataccaggagtgaggtttgggtgatcaaagacatttatatcgtttaatagggctgtgtctcagtgttctgtaccagtgtgaaactaagtcagcgagatgtctagatgataatcaacttgatgtcttccctgaaagtggtgaggacggggtgcagacacagcacttcgggctgtaactggtgagagcattttatgcctctctgtcctcagtgtatttaagatgaaaacaggaaatcatttttttatgcatgcatgttcttaaagggagataatctgtcccttttcataggtgaggcagttttgcattagatgcttccataaatctcagacttgatccccatttggtggttgttaatggaagactcctccaaaatccactctagggatccaatgagtttattgggctttgtcccagtgcttgtgtatgtgaggggctacttgtatggctgtgagtgttcttcccccacaggcctttcctttgctcagcagggatgagggtttccctctggttgtatagatggattcccccaccgccaagtcttctctgcttatccactacccaaggctgaggcgcatacaccaggtgttgttgtgctagggaaatgttagtgatcccccaaaacacacaggagccaatcggatgcaactcacagcagggtctttattctatttgagctagctctcccctacccccaatgcaccactgccacacaggacagttttggtggtgggggagtcctggatgtctattagggcaaggcttagtagtaagcagcaagcagggaatacgtgtgtaagcgtctaattggaaagctgctgtggcctttaacataattggctggtgctgggagtcgtatcataaacttaacttcttctcccctctgcattggtggtcattaggaaagggataggcttgtaacctcagggtgcaggtttgttgggggaataacctagagacactggtcttgttgagggtgtaacctggaaacgctggtcttgttggggattagcctagagactggagctaggctcaggttttgttagggggcaactaagaaactaatgctaggtaccagcctgttagtttacctgagttcaaactcaggtcaggttctcttaaaagctttggcatctccgtgtgagcagctgggttcttaggtgagggtctcgtgaccttccaagagagaatgcaacagtccagaaactcagctgggatgatccctggtaatcgggagcagcctaattctttaagatggccatttcttggcttggaggagcgtcacggagaaagagcaaggaaagactattttgatcacagttgtcagaattgtggactagtatggggctggagacggtgggatggggctggttctcactcagatgttagaactgcacacatgggtatgagcggctggctgttctagttaaggtatgagcagctggctgttctagttagggtatgagtggctggctgttccagttagggtatgggcggctggctgttctagttagggtatgggcggctggctgttctagttagggtatgagcggctggctgttctagttaaggtatgagcggctagctgttctagttagggtatgggcggctggctgttctagttagggtatgagcggctggctgttctagttaaggtatgagcggctagctgttctagttagggtatgggcggctggctgttctagttagagtatgagcggctggctgttctagttagggtatgagcggctggctgttctagttagggtatgggcggctggctgttctagttagggtatgagcggctggctattctagttagctgaaactgtcaacgagctgccttcttcttttcgactctgtttctcctactgtagaaattagagtaataggctgggcagagtgacttctacaggtagtcctagcacatggggagctgaggcaggaggatcactgtgaatttcaggtcagccttggcttcagaacaagaccatgtctcactgtttctcaataagaataataaacaatttccagttgtggggaactgttccaccataaacggcctaagtagtgctcctgctgataggaaagtccgggaaatggagaacatttgctcacatgtccatttatttattctccagtattcactgctcttggcaatttccaatacaggaacactttgcaatagattgctaatgatgcaccaggcatctgtagctgttgtgatcaatatggaagagtggcatatttataggcatatacaagagtatagaaggtacttgaaatttaaaacacaaacattactccaaccagtaaacacaaagaaagttatctcatttgatcagagttcaggaaaaaaaatgacaaaaatagaatcctcttccttgcatttgcaagaggcttcgttccaagcccctagaggatgcctggatctctagggagtcccagactctgtgatggctagggattctactaagcaccctgtgaaacaggtgacacctcaacagagaagtacttgacccaaatatcaatagtgctgactagcgctagccacaggggtacaatttcatgtagtcacaagggaagagacactgaagtgtctgataagtcccagcagtgaccgctacacagttctaggcacgatggaatggatatgttgctgtggatagcggccctggcattgtagatcaggactctgtagacccctgttcctgggagtgaatattcaacaacttaccttgccctctctgggtataggcagcactgctaaaactcagtcagtatactccgagagcagcccgcaattgctgggacagtcctagcctgttgaacatgacatgcatgttgtgggattaagagggattggtgttgaatactatagtaactttctgcttttccttcgcaggtgcctcgtctccagacatggagcccagctatgggggaggcctttttgacatggtgaaaggcggtgcagggaggctattcagtaacctgaaggacaacttgaaagacactctcaaagatacatcctccagggtcatccagtctgttagcaggtgtgtacattcttcctggccaggctggtggaatccaggcttccaagggatctggttgcttgccaaccccttattgggctgacatagtgtcaactttgtgacttcattttgactctgatcaatataaaccataatgttaagttcttttgaggctacaagtacagcctgtgggtctcagctcattggtatgttagcaaaggattgccactgactttggttttataaacaatgtggctcacgatgccgtgtctgtgcttataaactctatatggtgtaaggcaaggtgtcaaattatctgataggattcatgtctctgagtggctagagaattagatcagatagtgcacaggcagtctgagggttgaaatggaaacagaacttttgtatcatgcagtccttcaacatttatttagtgggggaagttaatttctcttcccctatatgaaaattcttacatgaataatgtagtagttttttattcttaagaattacaaaattattcatttaatttctgttacaatttgcagttttgaaacagaagtcaattccaatatatttattgacattctaatcttgtttccaaaggcaaacttttctatttcctctgttgtttaatcaggaccttgataggaagggacatagggtcttttgctttttctcagccacttctttctttcttcatagcggttcacaattaggaaagagagtttcaggtggacagacactctgaaccgtcagtgttaggaaagacatggcaggcagttctattccaagactgatagtgctcgtcaaggggcctgtgtggggcagcagcatgcacgggtgggtggtgaggccagaggatgtgggctgccttcccttagtgattagaggaaagagatggagaagatcaaactatgccggaagtggtctgattcatgatgtttaagtgatagagagagaaaagccttgacatatctggattgctctaatgagtgccctctcctccctcacttttagctacacaaagggagacctagactttacttacgtcacctccaggattatcggtaaggttctcatatctgttgactgctctgaggtgctgttcatcctgacagcagatttgtgtaacctgctttctgtctgtgtgacctctcctagtgatgtcctttcctgtggatagtgttgacataggattcaggaatcaggttgatgacatccgtagctttttggattccagacatcttgaccactacacagtatacaacttgtcacccaagtcttaccgaactgccaagttccacagccgggtaaggagctttcccactgagcaagggttgcagagggtgctgttgcttcaccatcggcttggttgaaggtgtttggcccttgggagatatccttggggcccttttcataggcgcatgaggtgagggactatggacactggaccattctaacgacaaaaattcttgttataaaatatgctgaaggttttgcttagctgatagtaattacaagaatttgtgcctgccagtgaaacacccctgaagctggcagctcaaagcattcggtggctgtttatgaggctcagtttagcaatggaactatttcacatggtaaattgctatagaaaaaccacagtttttgaggatgcctttgatcatggcatcatggtatcattagaagctagtgcagttagaacagtacagatagacctttttaagaataatgtatttctggggctagtgagatggctcagaggttaaagtattttctgctcttccaaaggatccaggttcagtttcgtcacctaaatagtggcttatagccacccataattccaggttctaggtgtctaatacccttttctggcctcagaggacacttcacatatgtagttacagatatacagagagcaaaaaaaaatgctcattaaattaaattaaatagtaatgtatttctggcatcctataaatgaaggatagtatgaaaacaatctttactgtaggactggtgatactattttaatttgtaaattaaaattttaatgacacaacgtcttgctacatagctctggctggcttgaaattctcaggataggccatgttggttttgaacttgtggaattgcttttgcctctcaagttctgggactatcagcttgtctttctatacctcatcttggtaatatgattatgaatattgttaatggaaaggtctacaatcaatgcttatgaagtctttacatggcatggagaagtttacatgtaacactacacacacacacacacacacacacacacaattcaagagttctctcggggcagaatacaattggcccagagaagtgaggtaaattgccacaaatcacacagcaagtatgtggcttcctttctttctcccccctgccccaacatggtatttgtattgattatctgagaattgcatgtgatgtaccctatcacactcacttcccagtcttcccaagcccactcccacccttgtgccttctccccaaaaataaggagaagaagtaccaagtgctgtcatttctcttcatggcaaaggtagaaaggtaagaaaatttgtaaattgatatagaagcatttatacatatgaagatatgcttgagtagctcttgtccaaacgctataagtgtctcattagattcatcatgaggggcttttgcctctctagagtcatcatttacagtccttcattattagagtctctgtgccaatcaggaatgtacaaatgatgcatacacatacacacacactcatctacacactctctcttttatacacacacacacacacacacacacacacacacacacacacacacacagtagttttgtataagctatatattctccataaaaagccatctgagctgtaggctggccaaactttcctttactggtcttttttcactaagggggagagttcacatactctagacttttgcaattcattcccctaccacagattacatagtatccttaacccctccccaggacttccagcagagctggtcaaaatagaaccggacccacttacctgtgtctctcaacccttagttacgggaagacggtccccaaatccaagtgttcccttcagctcaggttttgatttggaatatcttctttccaaagagatttgccctcctctctgactgtggactgattggcatctcattgtcacatactgagacagtctgtcttcttggtccttatgctctgggcagtgaggactagaaccacaccttcctgcttccagtttagtgaagggcctggtcggctacaaaatctcatttttaataaatgtaggtagattttcccataaagggtcagtattggaaatagtgtaccataggactgatgttactaacagacttgtggaatctagcgtcacatccccttagattttgtgtttgaatgtttggggtacagattatagtgatgaagacaggttgtatcaggaagattttacttttctgagggttgggtttttttgtttgtttgttttctgtgtcatggtgaacttccatggttttaaagccatataaattaacgggaatcatatgagacaatgaaatagcacttttgtagtatttgcacatttgacaggagataggcacataagacaggaattttgtagtctaaagctagtaatggagttgaccccaaacaagtgtggacaaataaactcacactgaaagtgaggcgctagaatgcgcattcagaattgccaaagaatttttttaaattattattcatagaaaaaatatctacccttggggattaaaagtgccaatgctgtcaatgacattcaaaccaataagatgaattggctaatccaaatcttctttctgaaaattatttattttaaatgattattgatatacctgtgtgagattttatgtatcatgttcataggtgtatgaatcatgagcaccattgcaagccaaaccctggcactggatcctcagaactgtagttacaggtggttgtgagccccccagtgttggagctaggaactgaacctgggtcaccttcaggagcagtatatattgagctaaccctagccctaaaacaagtattcctgaaatgaatgacaatttatgtcatttgtgtattttagatttaggtttgtgtatttagatcaattggtgtctttcagagaacttaacaaggttcttgcactagtaaacaatactgtgggactatatatataacaatgatacagttctaaccactggaagtgtatagtttccttaattacactcaatactgtgttatctagatccaaatctttttaaaaatcatctccagtgttaacgctgtattgatccactgtgtgcatgtgtgtgtgtgtgtttctgtacaggcttgtagctatgtcctttagtatcaagaatcattgttccacttacttcttggcaatactgttggagaaaacaaaaggctgggtgaatagaggtcaactctaaccttgctcagtgtccccaagttctgggcaatggcattcagcattgcccaggcctgcccttctctatccacctatgaaggacagtactgggaaagccttggtagtagtgtagaaaccagtcacccagttggtccttttaaaatcttccttcatatggattatttccaaatctcgtagggtgtattttttgcctttgaaaacagctcagtttttggaaggtgtgttaatgacttggggttcttacagggctcatgactgcaagacaggggcttccctcatttgttacagagttcagtgaagaagtcccagtagctcctggtcgtttctgctttagtttgaggttggtgaggagatggctgcagaggagagagtgataaactctctctctctcaggctctgtacattattatctgggcaggaattaggaagggggaaattattacctggcttgggagccagaggctcacatactacagatacacaaccttctatggactgaacgtctctacctaaggtaaagctcagttaccttacacacgccttatggagctattcttaagaactataggcagggcatcatagtaaagtttattttttttttgttaggatgaaagtatacacaaataataaattttaaaatttaccttaggctcatatctcaaatgttccttttactgtacaagacattcttccactgccttgactcagttgttttcttgtataagatagttatgacagttaagtgttatggtacctgcctttaattccagcactcaggtggcagaggcaggcagatctctgtgattttgagaccaacctgtctacttccagagttagtaccaggacagctaaagccgcagagagaaaccctgtctcaaaacactacactataaaaaagattactatgacaatagcagtatctatttcacaaatgcccttccttcctccttcccttcctccctcttcctccctcccttctccttcctccctcttactcccttcctcccatcttctatcccttccttcctctatcctaccttcttctatcccctaattcctccttcttttattcttccttcttttccttcctctctttatagtactggcgatcaaacccagaacctcatgtgtgtaaggcaaacattctaccaattgaacaccatctttaacctgcataagcagtttttcccatgtgcttattgtcaaagataaatttgtttaataatgcctaacttgaagtaagcacccagtaaatggtgataaagattaacagtggtaataatagactatcccaattggtgactgaaatacttgtcttccataaatgtactaatcaggaaataccagacacggtgggtcagcctgactctctgttatacttttggctcttgtgcttggcacacagcttagaggaaggtcaatattggtggtgtccagctccagccctgctgttgtcttggcctcttccagtatcatggtgagcctgcgactgccatggtattctctgataatcagtgagtccagcagcattcagggagataggttaacaaagtgtcacacagcctagggccatacacgttgtataaagtgtggcctggagagtcacagaaagctggcactgatcagattcctaatttggtgatggtggggtgtttatggcttaatgtttttcctactttagacagagtacacgtttttttttttcttaaaaatgtctaattatgtgtttgcctagtgccatgtaattatatatcgaggaaagatataattatggagtactttaaattaatattatttccttgattgatttaatgatcctagagctgttagcttattgtcgaagaacaatggagccagcttttagctgagactcatttcagatagtgacatgcggtatgtgggtagttagcatatggttttttaaatgctttaaatttaccttagaagaaaattttcttgtatttttcactctgctataatgtaaaaattttccaacaaatttgatctgtctatcctttctcaaggatatctgtgtagaagctggtgagatggctcatcctttaagagcagaggctcagggttcagctcccagcactcacgtgagacaactcacaacctctggcaatacaagctcaaggggatcttatgccctctgttggcctctgtgtgtacttgtgcataattatgtaaaacatgttcataaataaaaatggaataaatcttttagtaagatattagaaaaatcctattacaaaaagattgcaaagtaaggtttatttctttagcttttgttcattcattcattcattcattcagtaagtacctacccacctaagacttagacacccgactttgaggttacaatagggaggagttacattttcttttgtcatggaactcagtaaccagggagggagacagagcagctgacactaaacctgacttaatctcaacagcaaccctcaatattcaacttgcattcaacacccaagagaatggaagcttgggaaagtcactaggttgtcatggaaactgcaacattaaacacaatcctgggacctggagagatggcacagtggttaagagcactgactgctctcccagaggtcctgagttcaggtcccaggaactccatggtggctcacaaccatctgtaatgggatcagatgccttctggtgtgaactgtactcatatacataaaataaatatttaaaaaaacaccctgaatctttaactaataaaaactggaacgggtaaaaattgaccagggcatggatgcaaaggagattggttctatctatgagtgtcagagagtccaggataagtgaaaacatgaaattgggctttcaaagggtaacaaagttttccaagagaaacaccaccaacaggaagcagcatctacagatctgtattgtatagccctggcaacaacagccattctcccaatttttcaactgttttattctgtaagtcatttctattccgtgagaaaacatcagtggagcagacttgagaagtacctagtagcctggatagcctgacttgtgttgggtagaagggttagccactgtggagtttaacctgatagacctgagttgctacctccaggaccccttggtacttatgcgaagcattcttatgttttgtttagcatgctatacttgccgttctcaagggtatagaaaaatgggtaacctggaaagtccttgtcacctagtcattgtatagaaaagggggctccagtagaacagatagggaattctgcacagtgtccagccagtgctgccaaagttaatggataatgctcaaaagacctgggctgagcagtgtggctatatagatcgcttacctttgagagtaaaatttctcatgaacaaaattgtcatctaatcaatactagtctttttggattgtcaacagattaggacaagcagtgttatagtggatcgctaacctgtcaaatatgtatgttaaaggaaggtgggaaatagttcccctgaggagaaaactaagacatgtaagccacccttggctctctctgcaggacttttcatgttgtcaggagagctgagatgcaatagagagcacagagtttataagaaacatctagaagaagagtactagaaactgaattctgtgatacctaaggcaatttaaaaaaatccaagcattagtgtaaatgatctagttaatttaaagtgtatttctaaatatgttttcatatcttcagcagaaaggaattctttaattaaaacaaaacaacaaccaaactaacaaaactactgctatattgagccaggctatcccacctgtaatcctgtttctcaggaggctgaggcgggaagacagtggattcaaggctaacctgggctatgtcctgaaaccctggattacaaagttggtgtcgtgaagctcttccccttttggtatttacatcccttttacatctctgcctgtctgtgtcaaagggtgacgcagtgtcacttctagaaggttggtgtaactcatgattatggagatctcaacaaagtatggcatcaagtttgtctccctgcatttagaccctgttccatacacggagagacgacaggataccacttccagaagttctatgtgacatgtgcttatggagatgggaggattaatttcttttctccattcctttaggtctcagagtgcagttggcccatcaggcaggctccaagtctacacaacctgtttgctgtgtgtaggaatatgtataactggctactgcagaaccccaaaaatgtctgtgttgtccactgcttggtgagtgatctttgttccttctgctggtgggattttggtgaaatatggaccagaagggtaatgcctgagcttagcagcatttactgggactttacttagagggaaagcagtaccaggcagataaaaatgatggaagaaaagaaatgatgtattagtgttaaaacctatcttatttttggcctttccctccctaatcccctaaagaaaaaataattattaaaggaagaatttattattcttggtggtgttttattttgttttgagatgaattcatactgtgtagtccagtcaggttctgaatttgtggccatcatcctgcctcagtttcccaagtgatgggattacaggtttgagcacagtaactggctttactcttgatatttgagtaaaagtaggagaggtctgtgttcacaggccaattaatgcaggggttctaaaatgtgctgcgtgtcataaaagaggaaggaaaggagttgtgggtacacaggtaaaaatgctctaagctttgtatgagtaaaatggagataaatgctcttaactatttgtgtttaagtaaaaataagagacagtgacatttattcccatggaagtagtttcatggaccagctcgatttccaaatgattctcgaagggatggctaggtctttgccttgggtttgctgcagcccctttcctcagctcttcctctcaggcctcttacctgtcccttaaaactcaactttcagcaaaacccttccaactcttgagtaatttccatagtacggacatttccactgtgcatctaaacatcgcctgcggcactgaatgcatgacatcaccctggccgttccctgcccgtttcccactggcctgtcctcttgcagaaagaaactgccactgaactgtaacacaaaaggttcgagcaagtggctgtgtgcatgaacacagggagtcgagcatcagcgctggacatcgttctgtcttcaaacatcagtccgtttgtgttgtggtttgttcttctgttttgctctgagggcctccaggttgactctcccctccgtaagtgccagctggctggaacagaggagacagttgaagaatgtttttcatagttctatttccactcccaaattcttggcaagaatgcaaagcacttggtatctgtaagcatgtagggtcagatggataaaatggatacaaatgtatttaattttcttaactacttgtgtttaaaaaaaaataagagaaagcgacaattatgcccctgtgggtagtttcacgggccagctgtattaaatgccacggggcagggcttggctttcaggggcacattccatcccctgaagaacagcttgcttttaggcctaggcagccttaagtgtaatgaggattttaacttaatttttctttctgaaggtttagagagatggagccaggcagtggtgatgcaagactttagtaccagtactttcaaggcagaggcaggtggatcactgtgaattcaatgtcagcctggtctataggacagccaaggctacacagagaaaccctgtctcaaaaatcaatcaatcaatcaatcaatcagtcagtcaatcaatcaaaagtttagagaggttcgaggctttccagctcttatactgcaatcacgactcaaaaattcaaggctttgtggattcatctggggatttgattgccatgctcactacagttggtcaccctgaaccaccctttgtagtccctagctttctgtcatcatgtgcaagttctagaaagccatgaagaggggctggagagatgtctcagtggctaggagtacttgctgatcctacagaggacccaagttcattactcataactcatgtctggtggcttacaactgcttgtaacagtagttcctaggatccagtgtcctctcccaacttaggtaccagccatgcatgtggtacacaaacatatattcaggcaaaacatctgtgaatataaaaataataagcttttaaaaagatgccatgaaagaacctggagagatggctcagtggatatcctgtcttggctggacttgactgcagcatcaggcttcaggcatcttacctgtgtgatcatgctgaagccccatggaaaaacatcagaggccgatgatgagtgtctggaggacgtgcaggccagctgtcacctttatgaaagtcttgggctgcagtctgacacctattacagaagctgctggctagttatgggcagctgtgaccctctgagtacccccctgactctctgaggcatggatttgattcctttctttccaaggcatggagtcttcccaggcagcatcaagtcaacagctgtgtttggagacagagtcatcatctttcccattagtgctatttctttttctttcttccttcctttcttcctttctttctttctttctttctttctttctttctttctttctttctttctttttttctttttctttttttttttttttgattttttgagacagggtttctctgtgtagccctggctgtcctggaactcactttgtagaccaggctggcctcgaactcataaatccacctgcctctgcctcccgtgtgctgggattaaaggcgtgcgccactacgtaaatgaagatagttccaaggatgtgagggaggtataagtagatacaaagcgggatggggggtgaaaactgtataaagaggaagaaacagagattaaccaaggactgttgtctgtcaggatgttcttagcatcacttacaaaggccatgcatgaatgagtcagatggccttgaccagtctgggaaaaagactggaagctatgctctagcccttcagtgccctcctgtgtatatcatagatgtatttaaaataatgagcatatatcagtcctttaataaaaagtaaaacttaaaaaaaaaaaaggtccgtatgatagataaaatgagcaaacacacatctaagagttacaattaagaatggcaacgaggctagttctggagagaatgacgagtcaggaaagtattcctcacatccgaaacccccacccctttctatgttcagagcagggatagtaaagtcttgaggcacgtagtataagtctaaccctttactgcagggggacagatgtcaggctggcagggacagctgatgagctgaagttggcaggtattgaggtagtagaatatgcaggtttaaggtgccccaaaattagcccattttcaggacctaaattctgtgacaaatttctgacagcatgtggagaaatagctatggctccctgccttcttctgaggaaacacaaagaagaggagccaaggaagcaaaggaccctcccacccctgccaccctgcaaaactacgggtcctcaggaataagtcaaacaagtcattagatataacttaaaagtcatagggaaaaaagcccacagactcagctgagcacaaggatcaaaccaatgagacattttgcagggaggcaagtagactagttgggaaagtttacggggttcctgcttgagatttctacatttcttgtggctaagacggagtaagctgggacaggttatttaattttcagttgggttatagctcaatatctgcttggagtagtgggtgattcatagatcaacatattatgggtgttgtttagttatgttttaaaaaggaatcatcagctttggtgaaaatatggaaggcaagctttatcagttctctcagaattgggataatcccagaatgaacctggatttattatttatttatttttcttaagttcttataatgagctggagagatggctcagtggttaagaagacaggctcttccagagcactggagtttggctccaagtgcccacatcacaactgtctataactagctccaggcacctggacctcttctggcctctgtaggcccctgtatgtgcacacgtgcatgtgaatgcatgtgcacttgcacgcaaatgttttgaaacaaaaattgtttggttgtttaacaaacagtgtgaaacataggaagaacatgtagccagatctgaaataattaaacataactgtttaccttaaagattgctctgctgtgataaaacaccacggtggggtttatttctaattacagttgttccatatcacagtctatcaccgagggaagtcaaggcaggaactcaaacagggcaggaacctggagtcaggagtgaatgcagaggccatgaagggagcgctctttcctgccttgacttcctggcttgctcagcctgctttcttataccattcagcaccagaagctatttctcagcaaatatatgcaagtagaatttgttttcctgagcttcttgggtgattatagagtcagttttataaaagtctttccttgatgctttgtgattttttttttttttttttttggttttgaaatgagcaattctgaagtaaaaggaaactcgcaatttggagttctctctgttctctctctctctgcgagcaggctttccctgcaatggatgtttctgatgagtttgtgggtcttccttgacaggatggacgggccgcgtcgtcaatcctggttggtgctatgttcattttctgtaatctctactccacgcctggccctgctgttcgattactctacgcaaagcgaccaggaattggactgtctccgtctcacaggaggtacagtgatggaggcatcgggctggcacatgcgtgatttatgtagtactcggtgctgcggaaggtctgccttttgggagctctcttttagattctaattggttgctgttatcctgaactatgataacaaagtaaaatggattagaatgttgggttttcacatgaaccttcatttgaaagtctgtggctttaaaactgaaggggaatgttaaagaatgcctaggttttctttgtttgtttgtttgtttgtttatttatttattgggacagggtttctctgtgtgcaaacctggctgtcctttaactaactctgtagaccaggctgacttcaaactcacagagatctggctgcctctgcctcttgagtactgggattaaagggtgagacacctctatatcctgtcctgctttcttcatttaaaaggagaggaaagaggagtgagaactaaaccaaggttatgctgtgctaagcaccagtctgaaaacccactgaacatggcttgaccattctccccagcccggctcccagtgccttccagtttcatgctgtaggtctttattatgatgtgctggtagttgggtatggtggcacacacctttaatcccagctcttgggagtcagaggcaaggggatctctataagtctgagaccagcctgatctacagagcaagatccaggacagccagggttacacaggaaaaaaaatatacactgatgattactatataaaaatgcaaaaaacagagagaataggtgttttaaagcttaatttttcccatgactaagatataagtctgtaatcaatataggctaaaaaagaaaatgtaaaatggctttaaaaggaagcccaattttaggtagctgattaattttctttcctagagttataattagtttctctgttcttacttaaatctttggataaaattcaaattttggataataaattctaaagtttatccaactctgccttttgctgacatgcttaatctgctagatttaataggaatagatgctcagatatcaggctagtgaagtgttcccacaagcctttgactgcatacacaccctgctgttggctcagcgtgtcagtgaaaataagctctttctcattagaacaagctctcttattcttgttatatatatatgggtgttttgactacatgtatgtatgtactactcatacatgcctggggcttctgaggtcagaaaaaaaggtgtcagacccatttggaatagaagttacagactgggtgagcaactaaattggtgttgggaaccaaacctgggtcctctgtgagcagcaggtgctcacacccactgagtcatggctccagccccaatatacaagctgtcttaattgtctgtgtttccctgtggtagtttatgttaggaatgtgcagaatacattttctaatgcaatttaacttgcaagaacaaccgcagaaactgtcaatcctcctgctgcgatggtctcacagaatggcggtcttctgtttcaggtacttaggctacatgtgcgacctacttgcagataagccctaccgccctcacttcaagccactcacgatcaaggcaatcactgtcagcccagttcccttcttcaataagcagagaaatgggtgccgcccttactgtgacgttctgattggagaaactaaaatatattcaacgtgcacagactttgaacgaatgaagtaagtcaccatgttttctcttcttgcatatttaattcctgtgtgaattgcattcctcctgcttagtgctgtgatgggtgacaatttttttatagctcgacatagtttaatcaaagatgagcacagctaatctagggatttgtttcctgtgtagacaggagagtgtttgaggtgtctaggatgaggggagtgaggtgggcacagaggacctgcacatttgaaaaggagactctgtgatttgggtagatgattgttttagtacttttaaattgatgtgatgagacactatgaccaaggcaacttatagaaaaatgatttttcgggatcttaccgtttcagaggatgagtctatgagcatatgtgggaagcacaggagcactcaggcaggcttggtattggtacagtagctgagacacaatgaccaagaggtggaaatgaccaagaggtagaaagagctaagtaagaatggtgtgggtttttgaagacttaagcccacccctagtaacacacctccttcaaaagtccacacctcttaatccttcccaaacagttctactaactgggaaccaaactattgaaatatatgagggggggggagcattctcatacaaactgctataaagatgatgaacttaaaagttcttatatgatctacaaggatgaacaggcaccaatgagagggccttggattttaggacataaggggatggctggttacaccacacagatttagttggcaatagattaatttaggagtcagtggtctagactcccagagagtatgacatttttgtttctgtcctgaccttggttggcatttactgttaaagtcaggaaaaggtgactatatggggcatggttgtttgaggaaaacaagatgtgcctagacgtccagattggatggagagagaaggcctacattgttgtgtcagtgctctaccagccaagaaacagcctgcagccagtccataccggcatcattcctacatttgcacaagataggaaggagcttctatgtctaagtctgggtgagcaggtcccttagagccatagcagaggttcctgtgtctgtgattgtaccagactctcatgatctcttctgatctccatttaaagagaataccgtgtccaagatgggaaaatcttcatccctctgaacatcacagtccaaggtgatgtcatcgtttccatgtaccacttgcggtcaaccatcgggagccggctgcaggcgaaggtaagctttcaggaggacttggactgtgagctcacctgagtttgtaacaggagtattactgggtcttttctctgtatcactttgggcttgattgacaggtgagtttggagtgagaaagagcctgatggcttgttgatgtccatcttctttgtcactgtggaagggaatggagattgaggcaggttgtaacttatacatagtcccgggggggactctcttgcatcatgactttcagcaagccatgttcttgagaatatgagtctttttttttttcagtgctgtggttaggggaaccactataatatgagcactttcaactaagtatgagtatagttaagaattttttccccaagagatggttcagcaggtaaaagctcttgccacaaaccctcatgccctgagttcaatttccagaatgccttccccaaaggtgttgttactattagaattatcttattttgaaaatgtttccttcaccactaaaagagaccttgtacccatcaacagtcactaaccatctccactcccttcctcatctcctgactaccatgagtctttttcctgtttctatagacttgcttatatgcagacatatcatatagatggaatcatataatatgtggtctcctatggttggctttttttactcagtgtaatagattgggggtttatttatgttttagcaggtagccatattccattcctatatatagctaagcaacactaaactgaatgtatataccgcatttattaactctccatgcttagattatttctcctctttggctattgggaaagatgttgcaagcaattatatcttaatcaaatatttgctaagagcatatatcatatctattgtctaggtgttttggaccaacaaaaaagtaagattgtagccttagctttacagaactgaccctagaggggacaagtcaaacatatgaatatccactatgctgtatcagaggacagacaggactctgtcattgcaacagtgtttttagctagtggtcaccaagcagactatggaggtgggccttgaaggatgatgagtttgttgggctggagcaggagtctctgggaagaaagactacagaaaagcacaggacactgatgagtaaggaaatgtcttgctttcatggagagaagctagaaatgaacctgggaggccatttaatatttatataatatacaaagaatcagataaaggggtaatagaaggcacagacacaatattcgatgtagactcccgtttctcctactaatcctgcttcttgcacatatttttaggtgaccaacacacagatattccagctccagtttcattctgggtttataccactggacacgacagttttaaagttcaccaagtaagtgctgtgtgcacctgaggcctttaccagcatggcaggaaagctccaaaagtctgtaatagcatgctgttgtctccagagtcctgagctgcaggctattgactgtggctccatcacttagagaggctatgcaggtttgaagtctttccattgagtatggttgatctaaagaagagcaaatggattgagttaactagaaaggtctaacgttccatgttagggaacaaaggactatgaccttgatcctgtgtgtttgtggctagctatccccaacaggaatggtagagtttaatttctgggatggcataagcagtgactcctcacaagggctggctggctatagtaccaaaagaggttctggggaacccagctgcactgaatatggacctgctgatgctataacgtaatgtggctatagatctcagggtgtggctgaatctggggtggtggggatggttgctggagctaagaaacaggaaactatgaaggggttcagaggttcaggttcagaaggtggctttggacctgtttcactgttttgatgacccatttagccatgccagttaatactggccagacatatcaactctgcttctcacagcgcttctattaatatgttccatagtagtccaacaatgtgaagaagtgttattcttctgttttctctacatgagaaaactgaggcatagcaaagtagcacctagttagtacccgagtcaacctagaagtgagtttcaagcagaactcgacagcgtgagccgggtcctgtgttgagcatcctgctgactgcactgtttgtgctgctgtttttctttccattaggcctgagctggatgcatgtgatgtaccagaaaaatatcctcagctgttccaagtgacactggatatagaagtccagccccaagacaaagtgatcgacttaactccaccatgggaacactactgcacaaaagatgtgaaccccagcatcctcttctcctctcagcaggagcatcaggacactctggccttagggggtatggctcttggatggcttgagttttcagaatgaagcctccagttacacactgtgtggttttgtttcctgtgttcggttgaccttgggaccttttgtcttgcaggtcaggctccagccgatctcccaccagaccatcccaggaatcttgggcaaggaggcttctttgcctctctctgttggcaaggtatggcagcgccttgaccttaggatgattcgatgataaagtggttaagttgtctggtattattaaaactcttcttgaagcagtgtcaatggaaggttcctttctcccttatttcaaactcttcccttcatgtttttcaaattggcatcttgacgtctttccaggccacgagtgctcagactgaccagaaagccaatgtcggctatgtcctaccttcctcatttgcagtatttctaagccatatctttcaagactgatgaagtgtgatgcatgctaagatccctctttaggctggtgacaactcagaaaggcaaaacaaagcattgctgcctgtaagcagatattctaaagaccgagctgggcattgtctcaaggactgtagctccaagcatggtgaaggaagtcaccgtggcctgtatctctgctagttgctttagcaaccattagcccacacagggctctaccgctgtgctattttctcccacaactggaggcatttcccgattccttcttaacttagtgctttacattatgatcttgaggggacagccactggcaccctagttaatgtaccctggccacgattgctttgcagtctgtaggcgatagctatgaagtgtggtatagaatggaatattcaaactttataagagaaagggttggggattcagcctcagagatgtcctcagtaacattttcttgatccccctgatgtgtgtttgtaagacaacactcccagatgttttcaatgttaggttaaaaagtattcatatgattcctttggctccaaaggtttgtttacaaaatcttcttttgaaaaatggaacagactcggaagcccaggcagatatggcttgtagatagattgttggtctctttcttggtccttaccttgctcctttctcacagtaatggtttctaataagtcattacctatccctttccactgccgtgttaatatgtagacataatttctgtatgggcctggagagttggcttagtggtcaagagcatgtgatgctcttacagaggactgtctgtaacgccaattgcagggaatctaatgtccttttctggcctctagaggcaccaagcacacacacatggtgtccaggcatacccaatacaggcactcatgcaaacacataagacaaaatgtttttaaaaagaaagaatctctgtagataaacttagggttttgttgttgttgttgttttgttttgttttgtttttcttctgagacagggtttctctgtataaccctggctgtcttggaactcactttgtagaccaggctggcctcgaactcagaaatcctcctgcctctgactccgagtgctgggatttaatccaaatgtagtcacttatctgcctgtggtttttacatttttgcaaaggtatgtaaaatatattacttaatatctccagtagcctattttctctttctgcaacaatgtaaacataacaaaactcacctgacccagcagtcagtcatataatcgtttatttgcacattggtcttttttagatcagaaatcagagaagtcacgctgtgaggaggaccacgctgccctggtgaatcaggaaagtgagcagtcagatgatgagctactgactctctccagcccccatggcaatgcagagggtgataagcctcatggagccaagaagccaggcaaaaagcagcaggagccagctgcgcctcctcccccagaggaagtggacctcctgggcctggaagggtctgatgtgagcacgaacttctcttccttggcagctcctcccagcaattctgagttgctgagtgacctgtttgggggtgtaggtgccacaggtcctgctcaggcaggacaggctggggtagaagatgtgtttcatcctagtggacctgtgtctgcacagtccacaccgcgccgaaccgccacctccgcctctgcatcgccaaccctaagagtgggagaaggtaatctttctatttttctgctatctttgattttaggaataactttggggccaaacaagtaaaactcaaatgctttaataagctgaacttttctagtttttctagacagtttcttggaaaaacatacaacacatacaaacattatccattttggtagaaagatatggggttatatttaagatccatactctctcttatttactcttttgaatattttatacatgaatactatatttacatcatttcccccttgtctcctccctcctccaactccccccatgtccccctcactcagttctgaagttcataatctcttctttgtcattattgttacatctgtctcttctttgtcattattgttacatctgtctcttctttgtcattattgttacatctgtctcaagctcctgagtccctgtagtgttgctcatctgcatttagggctgactacttaggattgcataacctatctgggacttgtccacggaggaaaagtcagttactctgttgatccactgctcttcatctaggggtggggctttgggaactttgtctgtgttggcatgccccctggtgctgtcactgagcaggtcttgtttagccagttctatcactgagatgtcatgggtgcagctttcctgttacctccagaagtcactctcttgaagcaggcatcctgatcctctggcttaacttcttactcttcatttcctcttcttgggacttaagccttgagtcaactttagttacttctgtttgaagatggagatggatgagctattatttactacagcagctgatatttatgtggtacccaccacttgccagatatggaatacatgattaaatatgcatcgcttcttttaaaatccagtagacagatgctactgttatttccacttccgagttgaggaaatgaaagcgtagagtttaattagcagcatttgttcaaacagctgggcgtagatggggccagggtccaaacttgacatgtggactcagagctttcccccagacctcctgaaatactttctttgaattctagttttctagatataccctggctatacagtgaagtgtttgaatacaccaggatatacttgagaggctcagaccagcagcacgtctgtggaaagaagtgtggctggtctttgtagggcgtctgagccatatatacttagctaggttcacttgacacaccactacaaacgtgactcttctttttcctggccagccacagcattaacgcttgcaaggtgatctggctgggtaccagagattcactgcagcttctgaataaccagcacaaagcagctctgtgaccggcactgttaaccaagatgctgctgcattagaaatcgtaaagagatgaatctcaaccacctaggctgggaggatgctgtaggaaccttttcccatgctaatccttcaccttcgctggaggctcaggggctggtcttggcttttgaagttctgctggctgcctcttttgtgagaaggggaatcagaatcacagggtttgggctggtggtggctagatgtatacccgggagcctgcatcccacattgtggctctttcttctgtgctttgctttcttccatccagttctgattcatcaggatgagtaagaaggtctttcaggaaaacaaaatcccaagattgaagacagcacagtgttccatggctgaattttaagacaaaccatcctaaggatgtttgataatttaacttgccatgtcctatgctgcttggtgcattcatggcagagctagaaggcaccttcgacattagttaattctgtctgtgacatcatagatacgatgatgagcatccccagttgttagtggcagtcctagatgtatggctccagtgtcctgtccctccaaaaagaatcagaaaggatgccaagtctagaattaatgacctgcatttgaatcacacaggactaacacttaactagttggggagccttgttaagaacttaatttggccaggtgtggtagcacatgcctttaatcccagcaattgggaggcagaggcaggtggggttctgtgatttttcaggccagcctggtctatatagggagtcctaggccaggcagggttacgtagtgaggccctgtctcactaccaacacaacaacaaaaatcatcttaattttcttagttagggattatacttatgggcataatggtaaagactaactcttgagttttcatccatactatttgcacttcacttttggctattagggaatttcttaaacaaggtgctattaaaagtgctctagtaatctaagaagtctttagtgttttctccattgattagcttcaacctagaaacaagtgggtttaccagttgtcctcttacagctaccctgcaagccctagtgttctgtgttagagaggatgaggtcataaatggggtcaaggatgtgcatcctggactgcatggctggaaacagtataggtattgctactgcaactccgccaagtgttgggagagcattgtgcttgccactgacaccatagctgtaaacttgtgagccacatgcctcaacacgtcgtgacagtgggaagtgtctgttcgctggtttggctctcaggctctatttctagaatgggtcagccccactccaggatgcaagcagtcatcagcttggtacctacagatttggaagtgacatctcactttaggtagttcaaggagattttttttgttccttgctccacagtgagaaatcagggcagttgtctccatgcagcttggtgattggtgtcacacttcgtgactagggcctgtgggggttatctggagttttgagctggaaaatttgactatgagtctagcctaaagtatttcctggagttgaacaaaagataatttctgaacctcagtttctccaggaatgagtgaaggtaatggcacttccgtttgtcagggagaagttgaggaccacccaaggtcacctctataacacagtatagccccaagaagattcactattgctgacaaccagggattcccaccttcttagttcccttacttagttctctagctcagtggttctcaacttttctaatgctgcggccctttgatacagttcctcatgttgtggtgatcccaaccatacaattatttgcagtgttacttcataactataattttgctactggtatcaattataatgcaaacatatgtttttctggtggtcttaggtgactcctatgaaagggccccaaagaggccaggacccacaggttgaggactgctgctgtagctccaagaagctgagtcagaaacacttgtttcccatggactcaaaaaaggctgagagctcagctttactcactcctcaggttttactctgcctttagctttcaagtgaactgaaactcacttcatacaacatcaaagcaaagcctacttagtggggttgcctttttcttttgagatgggtcttacataactcaagctgagcttgaactcattgtgtagcccaagatgaccttaaacttccaatatctttccatttacacctcctaaattgtgtgattataggcatgtgccaccatgcctagttctatgtgatgctgggaatcaaacccaaggcttcgtgtctgataggcaaatactctaccaattgagctacatccctagtcccatgagggggttttctatcatttttctttatagtagtagtgtcctctgtctggtattttcccattaattccttttacatgagcactcattagtcactgaatccctgtagcctatacacagtttgcgtaactcatggattcatctgtgttgaccttgttttcttgggcactctgtgactacgatttactggttttatgttactaagattttcaaaagctggcttggagagatagctcattgagtaaaaaagcttgccatacaagtttcagaagctgagtctcaatccccagaacacacataaaagctggatatttaaggtgaatacctgtaatcccaggacttctccaaggagatgggaagtagaggaagatgagccaggagttccaggccagctagcctgatgtatgcagcagaaaaatgacaccgtctcaaacaaggcagaagatgagaacagatgtctgtgctctgtgttgtgatgtatacacacacacacacacacacacacacacacacactgtagtgacacatacactacacatacctacatacatatattacacacacactaacatacgctacatatacatacactacacacacactaacacactgtacacaccatacacacataatacacatacacacacaccatatacactaacacacatactgcacatacctataccacacgtatacattaacacactacacacactaatacacacactacacatatatatactacacacacatattaacacactacacacaccatacacacacatatcatacacactaatacacactacacatatatatactacacacacattaacataatacacacaccatacaaacacacaaataaacacacataatacatatacacagacaggatttataaaaagctaattggacactcatttagagttatagcttttctactaaataaatccagactctttcatctacagaggtggggtaattcctgttgtgtgggacccactgttagctccagagaacgttgtgaggctaggaagggctggggaagtcaggaggcaagtatcatcctcatatttctagtgtttgactaaataatggtggcagcttttcaatattataacaattaactgacaagataaagaaatgccatttccctttgttttctaggtgccacctttgacccttttggagcccctgctaagccaccaggtcaggatttgttgggctcctttctaaacacatccagtgcttctagcgacccctttctgcagcccacgagaagcccttcccctacagtgcatggtaagaaagtgttttctattctaatcggtggaatagtggagtggttgtccacaagacaacactgagtactttgtgtgtgtgtgtgtaagtgtgcgtgcgcttgtctattgtggtagttgctagccttgcatggctgcagagtagtcatgatgggttagtctgatttgaaatgtgttccacgtataaggcaaacaccagattccaaagtttcctgtgcaatgaaagaatgaaaggtatcttaatacttttataacagtcactcactagaataatacatgtattatctgctcaataaattaacatcgtatctgactgatttatgagtggcctgtgtagacctcgtttaccgcaccatcctcaggcctgggatcttatttccagttcccctccttcctatcttttattattcttttcagcaattcaggtttctcttgctctctttcttcattttgcatcctgatggatattagacttaacatcagaatgtaaagaaagccagagagcaaatgttaaaaaagctgtcgacttttggaactttttcttgagtgactgctgagctggagcagggcagagtagaaaggaaagaaccattgtcactaatagtggtgtaatggtgtgtgcttttaaatgcatgaaccgatgggaaggtacctggcactagagagatacaacagatgacaatgaagccttagaattctcgtcctggtgccttaggtcctttgtttgtgtggaatgtgggtgtttgcttgtgttgtgtgtggtatatgtacatgtgatgtttatgggtggtgtgtggtatgtatgtgatgtgtgcatgtgtgttgtgtgtaagtgggatgtgtgtggtttgtatgtgtggtgtgtgtatgtgggatgtgtatgtgtggtgtatatgtggtttgtgtgtgggggcgtatatgtggtgtgtatgtgtgtgttttcaatcctacttgtaatactgccttagtgactgaattctcctgaattttgtgggcaacttcctagggcaagattctctcctccagcagcacgtttcatttccgttctgcttggaactttgtgaggggtcagagtgtgctctcttgaagctctaatgggtttcttcttcttcttcttttaaagattaatttatttatttcatgtactcatgtatttcatgagtacactgtagctgtcttcagacacaccagagagggcatcagatcacattacagatggttgtgagccaccatgtggttgctggggattgaactcaggacctctggaagagcagtcagtgctcttaaccgctgagccatctctccaacccctctaacgggtttctttttgagtgaccgtagacacatatctgccaccagcatagtgggtgatgcatagtttttggctaattagtgttctgagtggctcatcactctcaatccatgctgcagtcaaggagaaaacagggccccagttctgagaggtttgtgccttggtgcccttgtctgtgccgagctaagccacgttgagcttaaggatatttccttcttttggcacggcccagaatcttaagtatataagtggggtacacaaagatgaatgagatagttcttccattcaagggactcagaatttaatgaagacaggcacccacacaactataattccaagtcagtggatacagaggtacataaagatgagccaaggaatgaacagcttctgccaagttcttgtgagcatgcacagatgagaacagcaaatatccctgttgcagagtggagtaaaagcccagcagcagaatggatccattagctacgtaaaagctgtgcagagccatgcaggctcgattgtcctgtgcaaactcagaagagcaggttctgagctgccttgttctcacccatcttctctccatttgcagcttctagtactcctgctgtgaacatccagcccgacattgctggaggttgggactggcacaccaaaccaggtaaaaaccagtgggttatttttgtatgcacgtgaccagtggtaaacgcatggtccttcagccaagatgaggtggatgcttggaatattgtagtacactgtgtagtttgatcattcccaaagatctgcagaccaatgtgcttagtgacatgaagtgtgtgtgtgtgtgtgtgtgtgtgtgtgtgtgtgtgtgtgtgtgtgtgtgctatttaactttccaagactcatctgctgtatatctaactcaacaatacaattagatgaatctgaactggctctaccactcagactctcctgtttttgtttttgttttttttttgttgttgttgtttgttttgtttttatgttgttgtttttggataagtctcagcttcagttttctcatctgagaaatggggggaacaatgtttatttatcctacacagcaaagtaagtgtaagtaaagcaatgtaaatggaccctccctcattgctcatgactaaagctccacgcccaccaatagttcccatggtttctttcccccagccccagataaccagctttcaatagaaaagtggataggtttcctactaagtagaatgtcatagcatttgtgtttttgtgagtgccttatgtcattttataaaatgtcccaaggtttatccatattgtagtccataggactatttcttccttttttaaggctaactcatatttcactgttcatataataccacatttttttttctttcctgtcgttttcagtggccaggtctaatgcggtgactatggtccttattttaatgactaccttggatgtatccccaggaatatgggtgctgaatcatggtcttttaaatctgtggcgatgttgcatactacttcccacagtaactgtgccctgctttgttcctatccaccgtggacaaggattctaattccttcccatttttacaaacacttctgattttttttttaacaaatgccaatcttgacatgtataaggtaatatctcattgtttacatgattggcatttcctttaataactagtgactgtggtgatttgaataagaatgtacatatacatgaatagttggtcccagttggtggaactgtttgagaaggggaaggtgtgtcactgagagtgggattgaagtttcaaaacccccaccccattcccagttggctttttatgcctcatgcttgtggataagatgtaagctctcaagtagtgctccagcactgtgcttgcctgctgccatgctccccgccatgatagtcaaggactctaattgtctggaactgtaagccccttaaacgctttcttctgtttgttgccttggtcatggtgcccattacagcaataaaaaagtaactaagagagtgatgttgagaatctttttatgtgttgtgatcatttgaaaattttcttagctgaaatatccttgcttatttttaaatcaagtcatttgtcaattcattattaagctttagttgcttttttattttttttatttttatttttttacatactgtggctcaaactctttatcagaataaaggttggcaaatactgtccccgattgtatatttgactgttttttttaaactctgttaactatgccttttgccatacagtttttttctcattcaatttgtccactttttgcttttattacctgtgactttgaattatattttaaaagaagttaatgggcaggatggttcaatggttaagaacattgtttgctcttgcggtggacccaagctagattcctggcacccacatagtggctctcaactctctgtaactctaattccagggcacctgatgccctcttctgatctctgtgggtattgtaaacacaaggtacacatacaaacatacaggcaaaaaacacccatgcacataaaataagtgattcatacaaaacattttaaagttaaaaatggtgtagttcaaagatgataagcaagacccctccagggggtggggggggcgttgagatacagcctgaatccagatctctgaagagagagagctggtacaggagaggtaaacacgggcaaaggcaggcatggaccacgaagatctcatgcctgacccgtgtgttgttcttacttcaggtcaccactctcctaaatcacagtaagagtatccagagacttttcacactctttcagactccatcctaatttgccttagaggcagccgagcgggttctctggaactcttgactttgagcatccaattcagggtccgaactcatcttcaatgatctctgttccttttcaggaggttttggaatggggagcaaatccgctgccaccagcccgacaggctcatcacatggcacccccacccatcagagcaagccccagactctggatcccttcgctgacctggggacactaggtatatatacacttatcaggtttagctgtgaataatacttgatgctaatgtcaaccatgtcagggacaaaggcacagctctacactgttcctatagcaatgtaagacttcccttaatcttttttgggaccttaggtaaaactggatccttgaactcaattcaaagcaaagtgagagtttaagcactagtgttaagaggaagagaggtactggggaagaaattaagacaggtttgagtgcataggtgtgggcttctcaaagtagagtctcgtgtgagtatcttagtattagccatagagactgttttgctttcttttcaggtaacatctcaaagagttgcttttttgcctccttttcagttaatgaggttctagagtggctccagaggtgccttggatgggattatagtgttataaaaaaataaaacaaaacaccaccaccacaacaacaacaacccaaaccaacccagagccactagagttacacaaggggttcagatcacacacttttactgtgaagtgggtttcaggtgagattcacagaaaagtgaaggcttaccattgggaagagagaaaggctttgcacaaatatttattacattagcattcttctttctcagccaagaataagccaaatataaaagcagtagatggaaataaatagattggagcagaggactgaagtgatggctcatcggttaagagcactgactgcttttccaaaggtcctgatttcagttcccagcaaccacatggtggctcacaaccatctataatggggtctgatgacctcttctggtatgtcttaagacgggggcagtgtactcacatacataaaataaataaataaatcttaaaaaaaatgggagcagaagtgagcgaaatagaaatggacaaataatacaaaaaacagaacagtgaagagatgagttataaataaaatgggcaaatccttcaccaactaaagaagagaagatgcacattaataaaattaaaggggggaaggagaaattacaacaggtatctgtgaaattcataaaatcacaagagcatgctttaaaattttacattcctctaaattgggaaacctaaaagaaacaattgcatttccagatgatttgacctaatgaagttaaataaagatggaaaacaattcaagcagttctgtaacaagcaaggaaattaagcagtgatctgaaaaaacaaaacaaaacaaaactctaaaactgaaaatcaccaggcccagatatattcatagacgattggttataccagggcattacaaaattatagtaccaaccctgctcaaagtattccgtaaaattaaaagaaaggtatagccagttttatcctgatgtttaaaccagataaagactccacaacaaaatttctctgatagagttacacaaaaactcccagtaaaatacttggaaactgagctcacgtaataatgaccactcaccacgaccaatttagcttagcttccttccagaaaataaggatggttcaacgtatgtaaatcaacaaaggtcatacatcatagaaacggactcagggcagaactcttgacaaaaagcaaacattggtcaacaatagcctttgaaaagctcagaatggagggaacatatcttaatatagtaaaagcagtgtgtggtcaacctatagccagtgctaaatgaagcaaaactcaaagcatttctcctaagatcaaaaataagacgaagatgtccgctttctccactcttatttaatgtagtgctggaagtcttagccagagcgataggacaggagacttgattaaaatggatgtaaatagagaggaagaagccaaaaagcacctttatgcgttggtccatggttctacacacgagagaccagaaggaccccaccagaagactgtagaagctgataaacgctttcagcaaaatagtaggataaaaaaaacccaacataacataaaaagccagtatccatcctgaatactaatgtttgtgctaagaaagggaacaaattctcatagaagcctccaaagcaacaacagaatatcccaaaacctttggaataaactagccaagggaatgaaagatctccataatggaagccttaaaatatttatgagagaagcagaggaagacattaaggaaggaaagctcccccgaccacgcccatggaccgcaagaattaacgtggtaaaaatggtcaccctatgaacaagcaatctacagatttcatgcaaccccaatcaaaattcgctgccagcactgaagggatggcttagtagttaagaccactgattgctcttccagaggacccaggttcaattcccagcacccacataaccactcacacttgtctctaactccagttccagggatcagacaccctcacacagacaaaaaaacaaaaaacaaaaaacaaaaaaaacaataaattacttctgagttcgaggccagcctgttctacaaagtgagttccaggacatccagggctatacagaggaaccctgtcttgaaaaagcccaaaaaaaaaatgtatgtatatatatatacatatatatacatacacacacacaccacacacacacacacacacatattccaatgccactctttacagaaacagaaaaagacccttaaaatccatatggaggcacaaaagaacacagagagccaatgcaatcctgggcaaaattaatattgctggaggtatcaccatacctgatttcaggttatactgcagagccatagtaatggaaatagtgtatagtgttgacacaaagccagactgttgttagtgaacggaaacacccgaatgtaatctatagagctagagctagagctatgtgcttggattttttgtttgtatgttggtttgacaaagatgccaaaaacatacattgtagaaaagcagattaagcaaatggtactaagaaaactggatatctacctgaactaaaaggaaaacaaatccctatatttcacttcccataaaaaccaactccaagtggatcaaagaccttcataaaagtcctgaaactctgaaaccattagaggaaaaagtagagaaaaggtctcctctgcacaatgtctacataggtaaggactttcgtgagaggagtgcagttgcttagggaatattgcccaacattaacaaatggaaccttatgaaattaaaaatcttctgtatagcaaagggaaagttaattaaaagaagataccgcctacagaataggagaaaattctttgctgctttacttcagagtatcaatatctagaatatacaatgaactaaaaaatactaaacaaaaataaaaattaaactcaaattgggtggtggtgacacatgcctttaatcccagcaattgggaggaagagacagtcagatctcctaattcaagaccagcctggtctaaagagtgagttccaggacagccagggctacatagagaaaccttgtttcaaaaatcaatcaatcaatcatctcagtaaatgacttgataaaatgaacagttttcaaaagataaagtaaaaatacccccaaaatgatatggaacacattcaacctcaataggcatcaaaagaattaaaaattgcacacattccatcttaccctagtcagaatgaatgccattaagaaaacaaaaacaaatgctagtgctgatacggacaaaagggaatccttatgcattgctggtgggaagataagctagtcagtgttgactttttttaagccgtttctacaaaaaaacctaaccaaccaaccaaaaaagtgtatcttccatatcagcttacctctctatattaataatgtgacattatactgcaaggatctctctctctttctctctctctctctttccctccttccctctccccctccctccttccctccttttcttcctccttccatccctccccctctcccttcttcctcttttttctttatcatccatctatctatctacccatttgtccatccatccatccatccttccatccatccatctgtcagtccatctgtctgtctttatccgtttattttctgtttatctatctgtcatttatgtcacttatctcaggatagacagactgccttctttttggttcagttgattatcaaccacttctgacattatttattctgctgttcttccagtcattggtctgttttatgaattctcctttgccttttatgtctgttttactcaagtctatcaagggaaagaaagaggcatcctttctgtacccgtatcctaaccatagaagccaccctggtcagctctcctatcctgggccctggcttatgtgatttcagattgaaggtggacagtgggatagtcaggcatttcccaagcttcttatactccaggtctaggtgtcttctttttgtaaggtgtctgtagtcatttttatggggaataaaatttagaagccaagatctgtatactaagtatgattattggagtgttatttctctcccttctaggagacatagtgtgtgtgtgtgtgtgtgtctgcaggcatgcatgtgagtgtgtgtctgtgtgtattggtgtgtgtctatgcatgcatgtgagtatgtgtgtgtgtaccgttaatctgactcccagtttctttcttgccttctactccacatgtgaatcttacatttcctcacattgcagttatagtcagacagcatcaatagtttcagagtagctaaacctgtatcaccacaaacaaggaacctgaacgtgcagtttggaaatgcagtaattctcacagcctccttctcagaacctggcttcttacacttctctactttttaaggtatacagcttagaaattttaagtgatttttcccactaaggccacgggacaaacagattcatcagtggcagattattataagccaaaatttccactcattagacaatacaggagtaactcagaaaaaaacaatagacagaggcctccagttcaacatcaacgctcgactactccctggataatcagaagttaactggcctagaggtggctttggtgggggtggagctttgtgagttccaggcaatctcttatgcttcccttgaggagggccttgaaggtgtattttgtcaaatgacagcggtaggcagcacatgttggtgttgcctctatttccaagcactctcaggtcaggaggatcaccagtgtgaggccagcttggcatacatagggaattttagaccatatgggttgcatagtaagaccttgcctcaaaaactggggttggtgatggaaaatgacaggggcagcgataggcttgagtgccaacctgaccaaatactcattgaggtttttgttgttgttgttgttgtgtgtgtgtgtggttttttttttaagatttatttataagtacactgtagctgttttcagacaccccagaagagggcatcagatctcattatagatagttgtgagccaccatgtgattgctgggatttgaactcaggaccttcggaagagcagtgagtgctcttaactgctgaacaatctctctagcccctgatcattgagtctttacaatgtgtcaaacatgtggttaatgttgttttgtggtgtgtagtgtacctgcgtttgtttaattcaggggctgtgaaacacttcctgcaatggttatgtgtttatactatacttactctgataaagacatagttattttgtagataagaacattgaagctcacagaaatttaaaaaaatcatttatcttaagaaaagcaagatgctttgtttgtgtagaatccaagtgcccaacctggcacatggcaggcatttcagcacctgcgggagaatggcttgggacccatgcctaggagagcaaatggtgcatgagagatagcactaaactcaaacaggttgattccagatgctataatacagcatccatgtgtgaaagggaagagggctctcagggtctaaatgaaaagacatagctatagaagaaagccataggaaggggtgacttttagaagcagctcagaactttggctgcagaggtgcagagataagatgctcgtggtcagggcatctctgttaaccaactgtgtgatcacaatattctcgtgaccctttgcattgaattgacctagtgatactatttacttacacgtaacacactgtgaagatctataggtgttagttgtttcatcatcgtcatcatcatcatcattattttggctctttgaagggtctttggagatcaccgtgtttcagcttctcaatttgcctccccaatactatccctcctgcaattcaatgcggcagtgtaaaactgaaacgtatttgtgaaatttagaaacagctataatgctcttgggtcctaaccaggctttttcttatagcaaatgataattaatcctaatagttgacatttaagtagaatcttaatgaggtcacttgttttatcccaatacttaccacttggtagttttgactctagtaaagaaattaaacttgcttaggagggagcagtctggtcagggtatcacagtatggtcttttggcttagactaaaaaatctagattcaagtattttgccataggctggctgtgtgatatagggagaaaaaaaaacccactaaagtactctgaattgctcttggttcattgaagaaaaaagtagggcaagggcactacctgggctgactgaggacatgacaggcagatatgcctgtgatttctctatctgttaggaaagttaactctgttaccacccaaagcagtttccactaaaatcatcacaagcaatgccttgtgacccaagtttgaagccactctcaatagccttactgcctctctcccttctcctttataggtagctcttcatttgccagcaaacctaccaccccaactggattgggtggaggatttccacctctcagctcaccacagaaagcatccccccagccaatgggtggagggtggcagcagccagccggctacaactggcagcagacacagtctaagccacagtccagtatgcctcactcctcccctcagaaccgacccaattacaacgtgagcttctcggctatgcctgcagggcagagcgaacgtggaaaaggatctactaacttgggtaaggatgatgacatgagactggtacagggtgacctgcctgtattgtcgtactgctggggatgttatgtctgaaagacgccattatagagtttaagggacatcaggcaatccataccccaagtactgtttgctttaactactgagctgtctctccagccctgctagattagattcttggcatgaaggtaaaaataatatgtgctaaaattgaactcgtcagatagtgtcagatacacttggcctttcagttggcttgatgattctctttgaggaacatggacaaaggggattctcctgcacagtggttaccatggattgagcacttacaacatgcaggcatagtgtagacatgttcatgtattattttatagcatcttcaaaaccaaagctctattatagatgaataatctgtgaggtagatctaaaaagtaatctctcaggtttttgagacttgtgacagagcctggatgtgaattccagtcatttggcaccagaacatctggctttcagtgtcaccccagctgagcatgatatcagtgtttgttcacagccctgctgtgacagaaatgcatgtgctggagatgtgtgacgtcatgtttattcttcagttctctggggcactcattggacaattctgttgagccatgtggcgtcccattcattattgttttgagaagatagtgggtgaatgtctcctgggagcacttaattttggtgtgcacatatgtgatctggcttcttaagaagagagacggcaaaccattcccaaccaggaaaaaaacaaaacaaaacaaaaaaacaccttgggttgattactgcgaactgtgtgggctgctgtggttttgttctgttttattttcaaatgaacactgagataaccaatcatgcttttagctcattcacgtgacaacacggtactgttaacatcaccctcattctctggatgaagaagcagaggtacagatgcctgcaacatccctgtgatcatagctggattttagacacacagagtttgtttccaggatctacctcttcaaaaagatacagagagatttagtctgaagccagacttacagggagagggcactaggatccaccgaacccatcaactgggtatagacaggagagtgataccaaggaggttgtcaaggattcaagtcttggctcttgtctaattgctgatgctagttagttgtaatcattgtagaaccttgagtaccttcatccacaaagttacactggtgatgaaatgggctttaatgatctagactccagtcctggccttgccataaacacactgtatgcttctggacagacctcttaggttatctattcttccactttcctcatctgttacacagagcctttaatgttcctcacaaggcaactatgaagggaacaaatgtatggaaaatctatactcctgtactcctgtgaagtggcagtttgacattttgtttaagaataaaagttgtgatggtttccaaatattatgttgcagaagggaaacaaaaggctgctgactttgaagatctgctttctagtcaaggcttcaatgcacacaaagacaaaaaggggcctcgaacaatagctgagatgagaaaggaggagatggctaaggaaatggatcctgaaaaactaaaggtgagtgaccatcctataggacaaagccatgtgacaagtcattgtgcccaaccacctctctattcattacctttgtgttggtcattagggactgaatacttgatagatacaacttgaggaaagaaagatttattctgacccatggtctcagaagatttcagttttggtgggataggaaagacatggccatgcacgcatgctgcatggctgttcacttggaaacagacaggaagcacagagaggggcactgtagcaaatggtgggcaggtggaaccttcaaagctccattcctagggaactacttacttctactagctaagccccatatgggtttcacaatctccccaaacaccatccactggtgaacaggggctcaaaacatgatctggtggaaaagaatttaaatcataacaccttctaagggtccttacctcctataatgtcattcaccaccataagggtaaaaagtcaacactgattctagggtaggacacagatcttatcaactatggaaggcacttcatactggcaatcactgggttacagtgggtctctgaagctgtggtttgaagatggctatgcttttcagtagcaaagtagctttgggaaggctggtgcatgatgctgagtttgcccaccagatgaacaatggtatttgactctgtagtttggaagaagcctttagattataagtatcagtcattagagtttagtgagaacaattcaccctttgtattttctgtccaccttgagaactttctgttcttggttgactgaaacccagtttcagttctctgtggatcaagagagaactatttctgcacccagggtttaccattctgaagacattaggcatgaggtccacataggttgaggacaggaaagctaatgacggtgaagcccctggcctctatcacagactccttccacttttaagtaaagaagttctattttttttcttaaaacaaaaaacaaaacgaaacaataaaaacatctatttttgattctaaagtctatgtgagaatcagttttggaaagggagaatgaggttgtttgtttgtttggtactttaaagaaaaaagagggtctggagagatgattcagtgcttaagaatgctcttaacctgagttcctgaggtcctgagttcaattcccagcaaccacatggtggttcacaaccacctataatgtaatgtgatgctctcttctggtatgcagatgtacatgaagataggacactcatatacataaaacaaacaaataaatcttgaaataaaagaagaaaagggaaagaaaagaaaaagaaacttgtcagtcagtgaatccaagttcgttaactggtagaggggataagctcttcacagggaaggcccagagtggacagctggatgcagattagcctgaaggcagagggtggctctgaaggtgaatggcatgaggacacagatgaggtacataaagatcaaactggcatatgacttatggcatgacatacagctctggagcagtagctgagagcttagatctgatccacaagcatgaggtagcgaaggaatgatataggttaaaagaccttaaaactcaccccaccttctctaacaaagccacaattcctaacccttcccaaccatttccaccaactggagaccaagaactcaaatatacgagactatgggagccagtctcactccaaccactacagcttccatttaatcacatattttctttataagatggaggttgttagtttgaatcaatgatataagggatcaatttatttaataaacctttcgagctctactcggtgccaggtctgtttggctactaagataaagtgataagaagcagtccaagaaactcttctttcccatcaatagctccaagtattgacgggaaaaggtgaacacacatactcaataatgagtgacatatatggcacgtttatagtagggtaggccctattttttcccctttgtggtaggagtcaaacctagggcaggtaagtataccactgagctatatcctagcacaactttggcctacatgaaaggaatatttagtggctggagcaaagtagatccaggtgtgacctcatgaagctcgtgctaggagtgtataattagctgtatgaaggcagggagaaatgagctcaaaccacagaggtgaactctgaagttcatgatcagtttttgaacagtgatgcagactagaaggacgagggggaaggtgggcttgtgttccagctagaggggcctgcttgcgcagtttcctagcaacagtagcggtaaacagtatagatcttcagagtcctggtaggcagaaagcatttgagggtcttaacctttttggtttttcctgtttgcagatcctggagtggatagagggcaaagagagaaacatcagagctctgctttccacaatgcacaccgtgctgtgggctggggagaccaaatggaaacccgtgggcatggcggatctggtgacgccggagcaagtgaagaaggtgtacaggagggctgtgctagtggtgcaccctgacaaggtgggtagcacctgccctgtcgtagacttgcccggtccctgtttcagtgttcacaagtataggataaaaaggcatgctttcaatttgctgattgactaagaaatttatttgacaaaacttactctgtgggttacttaaatcaagtatttaaacaaatagtcacaaggcatgaggttgtcaggaagcagtcaaagcatccttcacaaacaataggacaaacattttattcactatggaggctgagcacttcaaaggaaaaggctattgtcccagtggagggcggaattgtgtctacccaagagacaccttagggtatgtttggaaaaaagatattggtgaggagcaataagatgtttaaaatgtcagtgtgtgttgccatcactgctcatggtttgagtaaattacaagagctcagaagagctccacagatcagaacttgagctcccacctggccaagttcattgcagtttgcagccgcacgtcagactgaagtacaccactctgctctcattgagccgtagcagatatgagacatgaagtcatgattgcagtgcctttggggaacgcgtgtctgaaatccatgtttgatgtccatccctccacgctccttatgactaaataggataattaatgggaaatgttaattcatgaactttaatcagtcataagagaagtaagagcccacagaaactggcaaactgccctactagaaggagtctcaaagacctacactttatagggattggaaagggggagttttgaaacacagtcaaacaaagacatccctatcattaaccatgagatgtgtcttctactgcctaacaagctcccacttttcttcttattgatgggtttctgttatcctctgtgagctttctgtagtgcgcagtaattaatctcatgtagatagactgtaaaaagagatgtcttaatgaaagaacattttaattgccattcacaaactcagtgaatttaatattagtttaattttggtctgtggtatctaattgtgttttgtgttttctttaggcaactgggcaaccctatgaacaatacgcaaagatgattttcatggagctaaatgatgcctggtctgaatttgaaaaccaaggccaaaagcccttgtattaatttgtgagcttttctatgctggctgcagtcctgtgataatgcttagtgtgtaccacagttctgagattttcacagatgaaccaaaaattctagtaatgtatttccaatactaaactgttaatttcctcgtgaattcacttctcatgataaggaatgtgaacgtttggtttcttgaagtccatagcaccaagaggaactctagtgagctgaccttgcagagtcttgacattccagcctgtcctttgggaagccgactcagcattttgcctggggaaataggacctcggccacccaaggtgaaggcatgacatccatctcactgtctgagattaagatttatgagtggacattatgataatgggattgcgtaatggttttaaggaattgatttagggattgtgtatgtgtgggttttttgttttgttttgtttttaaagatgtaatttgaggaatggctttacacaaactccaagaatatcaccaaccaagtattttttaatggaaacttactgaagcctttagcttcttcagtgtgtgtcctttggtcaagagcattaacaattattgaagtgacttaacggtggaaaggggttatgtagaaattgaggaattacccctttcttttcctggatgagctataacccaagcacatgataaagaaatcaggagccctaagatgccaaatcttgactccaggtcaggacattggggtaccagctcctttttcctttaagtttgctgttgattgaagaaaaactcttgaacgataccaccaccataattccaaacctatttgaaatccccttctaattgttgccatgaggctcagtgctctttcttttgcttagccaagaaaacattcttcatgggtgacagtttgcaaagcagcttggcccattcacactttgtatagacctggcattctggtgactgcaagccaggggaaaaacagagaagataacactgagtgctatttagaagggtttggttggggatagagctgtggtgtgccttcagatccaattggatagcttgccagttgaggagtcagagtcccacccacccagtggatctggcccctcccaccccgggattatctccgctgggtttgctgttggatgcatgtgaaaactatgcaagaatgaaactttcccagactgacatcagctggtggcagttcactccagtgctcagagcttcccactttgcaggggaagcagctcctactgctgggacttcgctaggtctctgggtgagcacatgtgcggcatctatttatctatccatacctgcatatgaatatgtctaacgtgcacacacacattcacaaagcaggtggtcaaaaagattatcatgctgatcttaaaaggttcacattcaatattgtgaaaagctttcagaagttgtgtttccaagacaatcattttgtttgtttgtttctgttttaatattcttgtgacaactaagttgaaaaagcagcatgtcagaaataattttgattctatatagacctcttctctttttttaaattataaaagtttattatttattttacctttaactgataatgtgaaattctcaaaaatatgttctctttaaaatatacagttgtaaactcttcaaagtaaacataacaatctaggtgttatttattaacgtattatacaatgatgtctgacccagtatgtgcttgtcctatttaagattggaatgtgagacatgttgctgtgacctgttttgttttgtttttttgtttgttttgtttttgcctcattccatatttgtagatattgtgtgaactacagtatataatgacaataattaagaggatattatgtggctgtcacatacattttgagatgatagaactatattagctttgtgtcatgtttgcataggtcattaacgttcacggtttaaataccattaaatgttatgcgattagcaatgaggaagaacccttccttaaatctgggagtttcccaccgctctttccctgatgcattatgatcctggacgcctgtctatctcaaaactcttaacacgtgcagaccaataggttctgtgttccttttaaataccaggttgtgacagtttgttgttggccagatccaccatctcattcatatttattgtaatatatttttgttttgtaaatacatgaaacaaaacaaaatgtcattgttctaaaatatttgtaatgtatattaaaaaggatacaaaatacttttagaaatatacattatttttgtacctgcgggagtacgaggggccagagagatgacgcagtggttagacgtgcacactactcttgcagaggacctcagtacccacactgcctgtgtcttcagctgcagagggctctgatgccctcttttggtttccacaggcacttgcattgacgtgcacacacccctcctctatacacatgattaaaataaaatagatcttaaacaagcaaagaagcatcccaaaccaaacaaatgagaaatggagtacaatggcaaacttgacagacaccctctaacccgacttgcttttaaagatcggtaagggggaagaatctgaaaagtgtggagtacatttgcaccaaaaggtaacctgacaagattctatgtttatactttcatctcccagtatcactcatgtcttgaggcagacagacagacagacagacagaccccactggtcatgtctgatgaaaactgtgttgcaaaaggactcagcataggaatcctgttcttactagaatatgaatgtgtttccaaccacatgtttgtgtgctgagtcagagagactgatttaccatcgaacagaaatgctggatatttttaagcctgaggacagagagaacatatgcacatttgtagacacactgttccagagcatttgagccacggctttgctgatgtgtccagaccagtggttttcaagcttcctaactctgtgaccctttaatgcatttcctcgtgttgtattgattcctctaaccataaaattatttcattgctactgtgtagccgtaattttgctacttttatgagctgtgatataaatatctgatatgaaatatctgtgggagccacaacccacaggttgagaacctctggtctggcagctcaggtcagtactagtgctactggtgagaccacattgggtaagaagtcagcacaaaagttgaatttcagaggatgttatcctagttcaagacattttccatgatgaaaacaccagcttataaaatgcaggtcaaatcaagagttttttttttttttttaactattctaaaaataagccataaagtttgtggaatggtgatatatgttggtttgaaactaaaagagtagctatgaatactgatttttttcctacttaatatctgttatattgacaaatactttaaactctgagtcgtgattttatcatttgtaaaatagattccttacaggtcttatgaggcaccatgtgtgtaaagtattacctcacagatactagccaataactatcagtactgctaatgataaataagactaggtgccacactgatggtttttgagctggaaatacatggagccctcaggttcagaaacggctccaggaataggaaagtctgctgggaacaccttattccttgacacttctaccagtctccttgggacggggtgagatctgggtgtagaaaatgacagatgcttgtttctgttagtgtcatagcacaattctgtttaggatgcactgtgaccttagagcctcctctggggcagatgtgtgaccttgttgtgcccttacatgtgtggcgctgtaagatctggagtttgagaagggtattttctgtggactagggggaggtgatactatttattataaacttactaatatttgctatatcagggctcagaaaatgactacaaactacagattccagaacccaaatttctcctatctcccttcttcttttcttgtatctctcattcttttctaggcagatcatagagactagaattcatctttgccaaggcaggtcattgaaaccacaccttttccccaaagccagatgtaaaaacgaaaatcactcccaatctcctcccttttgccataagagttggccacctgaagtcctctctcattctctgtagatcacaaggtctcttttccagggaagggtcttgtgccatatctggagggagcgctgcacagagcaaccaagaagaatgaatagacagaccctttggattcctctcttagtccattactgttcggccagtctctttctggcccataatctttctgtgtggctgccaatgcttcatcaaacctaaacataagattgcacagtacacacagacttcttgagtcttcttcagcctgcaggcttctgtgtcatttcaaactatgatcaaataaatttgctatgatttttttatgttgtaacctgccttttgctatagttgtattggccatgaaactttatgaatggtaaagggatcaccccttttttgttcccagagttaatataatcaacccttggtatatgctatagatgagacactagtaaatatgtatattaatatgaaatcaatgaattgctttgaactctcttaagataaggttttactgttgtttctcctcactgtcaacccctgcctcctctgggcataagatctactatgagaagaaagcaactgattaattgcattagtgtttcaagacttggtctcagctttcctgttccgtgtcactatttgagcttgagttttaccaactgtcttagttagggttttactgctgtgaacagtcaccgtgaccaaggcaagtcttatatagacaacatttaattggggctggcttacaggttcagaggttcagtccgttatcatcaaggcagcaacatgggagcatccaggcaggcgtggtgcaggcagagctgagggttcaactccttcatctgaaggcagctagtggaagactgacttccaagcagctagggtgagggtcttaagcccccatggtgacacaactactccaacaaggccacacctcgtaatagggtcactcactgggccaagcatatacaaaccttgcaccgactgtaaagtggtgataataaaatctatttcctagcctttgatacttgaactcaaggaggaaaccctaagattcatcttaaggactctactctagtcacaggcagtcagacagtggcccaggttaaatagctgagtaacataggagggggctggtcggagggagatgcaggttccagtggcttttcttcttgtggaaatgtggaattggtgagtaggatggtttttggtgcaacatctggcacaggaaaagtccactttctcaggtaaagtactcagtccagttgttgttggcagaaagcagtcggagagaaacaaacagtgtggttgagggtggaaggagagtgggacggtttacatcacataatctctttatttaaggtgggaaaaacctacctcctcactaacagatctcagtgcttataaaggagaagttaaaaacacaggtctggcagagcaattttctgagtgcttttataggcaccataatcccccattttcaccaggtacgttgtccatgatgctggcacatgcctgacactgcagaccctgtgtacaagcttcatcctgtacacactctcaatggtacaatggcttaacttgttgtaatggttacaatagtattaacagtctaaaggagaacaattgctctattgtggtaagttatgcaaatgtgcctctcagaatcactgattgtatactaggttcttagcagattaagcatatatatatgtatatacatatatatgtgtatatacatattttccttttaagtttagaacttcgtgggttttgactttctaaccttgtctaaagagctgtttggttcagttcctattctttctgaactgctttctgtagaggacttggactactggatggtttctaagatgaaggaagattccactgaagaaggtaagaataagatggatctggaggagtgaaaattggccttagttacttgcaggcctgcgtttatttaaggacctaaagaaatccggacccacagagtttgtaatgaatgagggggatagacggacgcggtagtttacacaaaatgttaatgtagtttgctacaaagcaagcaaatctatacaaaagtcaaagatcttacatagggatatctctaatcctgatttctggtgctgtcactcactcccgatctctactatatcagccacacactctcaaaacaaaccacacaggcacacaggaagagtcgtcctggaaggtaacctctccccatccttatcccgtgccccactttttccaccagtcctttcaggcaagtttcctaacagccagccagggtgatggtgagcatctagaatctcctgaggcagagcctgggccccaagtcacgacagtgaggaagggatggaccccagattgagaaacagggctgagatgtctcagaatccaggatcccccgaagagttaaaataaaggagttattctgaagtaatcaaagtgggagggggctgagactaggagcggagttcccggccagcggggcggtgctgaacaaactgggagactactggaatgaagttctgagtggcaggaagtaggaccagtagagtccgagctatgagtggcggaggcgggatcagtccaatggggtggagttctgcatggcggattgggatccgtgctggcagggactgagctcagccaactgggggcggagtccgcgaagtggaggaaggcgttgggggagggtctccatgagctggaggcaggattatgtgccagagtggcggaactgtgggccgagcggaaccgggcccggcagaggaggagctcagagtggcagggatcagaaccagtataggaaatactgagtgcctgtagggcagaatctggcataattgggtgtgaggttgtaattggcagaattctaaaccagtaggaatcaggttctgcatggatggtgggattgggcttctgggggcgggaagccacgggatggggcggagtctaaaatcaggggcggggcctaatgaaggggcggggctccgttggttgggtaggaagtcaataccgtcagggggcgggccgggctttggattcgcgcgccggccctggctagtctgggtgtgggcggcttttggagaaagccggaagcagcgacagccccagctccagagacatggcgggcgttaaaggtacactgcgaccctcgcccgcggctagtgggtggggtcgctcctggctccaggctgcatggcgagcagcctgtgtgcgggtgtgcgagttcctgcagaccgcggcctcccgaatgcgcggcagaggtgttttgcggagcctataaacgctcgcgcccacgcccacgcccgtcagttcccaggcgggggcttctcccgtgggctgtacgttccacagtggtcccctgggcttttcagttctccgtaggtcacatcagggtcccacatcctcaccttcctgccccgccgcagtttcctgtggcttacagaggagcctttgtgtccaggatgtgtgttggaaacttggtcctgttgttcccttacggtttttctcgctgggcagaataatttcgggcgtgtggcactttggaaagtaaccagaaataccctattcgacgcaaccttggggctgcaattagatgggattttaacaagacttttcttgagtgtttactggtctgtgaacagagcagtatgtgctgtttgtgttcttgaatggtgatgaaaggagggtaccgaaagattatcaccctgatctgtgtgaatgcagagctttgggcgttgggtggggacaaagttactggaaggcttcctggtatttggatttctggtcatccgcacagagaagacttaatttatctctgtgttggacttcctttctttgaaaactatccacaaagaccttcccactcaccaacatctgtaagatggatacagtgtatactcatgtggatgcactgtacattatctgtgcacaactagtaacagacatagctaaccattttggggggacttttgtatttcaaatcaaagtaaacatggtttacttgggcaatgtccactgtatgacgtatccatttgaagacagtgtagaaagcatgtaaaattgtgtctcactactacagagtgttcagtcctggacagaaagtacaaagtagcaacagtaatttatgggcctatgtagtgaaaaggaacaaaggctatgaagtagacaagagcacaaggaagtaaaactttgcccataattcaactgttattgagaaactatgctggagacttgggataaaagataagtgagaagtttggactgagttgattgccgaaaataattatattgctgtgtaagaaaatgatgtgtgctctgacagttgagaacatagagataatatagtggagggaatcatgttgctccaaaagatatgttttaagttgtaactccctgctgccaaatgagggtgtggccttgtttgcaactagcagatgttatcaatctaaggttgccttgtgtgatgtccttcagataaggggggggggggaagcacaaagtaaggattgaagcagagggccccaagatggcttggtaggaaaggcacttgctgtcgagccttaagacctgcgtttgatccctgggacctacctggttgaaggagagaaccaactcgaacaggttatcctctgacctccacacttgcacacgcagtatggtgcatggctacaagtagatagataaacgtaaataagtaattttttaaaaagtaagagaaactggagtgccgtagctgcaagccaagcagtagtatagacatagcagcactgggcaaggaagtttgttctcttcagagacgccttaattttagaagcctaacttcagaaccgagagaattcattccctttgttcagagccacccagattgtagtagttcgatgtgaagctaatatgaatgaccactctatggggggaatagaagaggcgatagttatgctgaatttacaggactctgtaaggcttgggttaagaccaggatatattcatgactggggcagaggccatgacagaacacatcttattcttctcattttcccaggctcttggaggcagagtagggaggattgaagctggagaaggtaggggtcagatggtagtgagcctctagtgacaacatgcaggctgtgaacacatttgcaatgggtaacacacacaagtacctactgatgtaggtggaggaaggactggaagaggctcagtttggcagcagacagcgagcatacatccaggctaccctgcgcagagttcaagagaagacgggagttttgaatgaagtctcggtaaaatgagttattttgatttgctgtagagcacagctctggtttcagccctctaagattggtcttcaagagaagatgaagcgtgtgttgggagggtgggggtgggggtaccttctggtcccatcgtcacaccagccctggcctggatgctgactccttggaccgcaagcctcaagggagagtgctctggacactcattagcgagcagcatcaatgcttaaacaccgctgatggcatcctgactgggtgcttgtagttctcacttccttctcccagtaggctccagataaaaaagatgagctagaaaaactgtttataagaaccaaaatgatgtggatccctgnnnnnnnnnnnnnnnnnnnntggggtgggggtgggggtggggtgggaagaaggaaagttattttgcatgttggatttgagctccttcttggctttggctctgtggcacagtagtccagattagaagtggagttcttaggatctcttgtgggccggagccttgcatttgggttgaactcagcttttcagcagtcatgtgtgaagcgaaaagagatggacttgaattgttggttaactcctactgtaattaagaaatggcagtgtgctggcaagatggcttagcaggtaaaggcttgcacacaagcccagtgatctcaatgcaatcccgggatcctatgggaaggtggaaggagagtactgatttcataagattgtcctgtttacatgtgatatagcaatatacacccccattgatcatatactcagtttgagaagagagggggtaggcaggaatacaatttctaaacacacacacacacacatgcacatggcttgaaggcaaccagcagaaataaagttgtgaaatttgagagatggtttgggaacagaaagaagaagtaggtgtgtggttcgcatgctgtaggttcccagctgaaagagcgaatgttgtaggtagtctgatacagagaagggtcagggctacaagggaaagcccaggcaacttctgaactgtaagtatttgtccattaaaaataccatattaagaggaaaagatacaaactactatagaaattccttcgtcatctcctgacatctgtattcaccaggtttcttggaagggatattagtatctttctattagacagcttccctaaatatcttaagtaaaagaaagcaacaacaacaacaacaaaatcttaataagtcagtgactaattatattagggattttcagaagacaattgaaatgacccaatgtcttgtgctttgagatatcattttatcaaataatatagctaggtgagtggagacctcccatagccagcattggttgagcctcttttgccaagcactgtgtatagattacctaacctaatttccataaacccggtgaaatgggaccatctttgtcattttacaagtaagaaactaggctcagagagatccagctgcctgaagtcatacaaccaactggttgcagaatgactatctgaaaccatttggtggctgagagtccacctgatgggcttcacatagcaaagtggaaagggcaaattcatatgttcagatgtgggttcagtgtgggtagggaatagatacagtgggtggtcgttgggaattgtttcctatggaagcatggaggcactcttccaatacttgaagtgattgtagtttgagcacatggagactatttgggatctaatcagggaaagagagcagtcagcgttcagaaggtgtcagcataactgcctacggttgtgagttcccttcaccgctgttgacaagcttcgctgactgactgtcctcgtttggcaaatatagagagaacccatgtagtagtggcaggctgctggggtggcaagagatctttccacctttggtggtaaagtggtggacagaggcaggtatcttaatcactttgggctactctaccaaatgaaccagaaactgttaggctaaatgacttaatcctgagttcggaaggctaggaagagacagagcagaaaaggagagctgtagtttgtttctctcatgttaggacattgattctgtcaaaagaactctaccaccatgtcctcagctaaatctaaggacctcttaatatggctgtgcctgcccattatcctggccattgagctatggaggcaggagaatctcaagttggaagatttaaaaggtacatagacattcagttatacaggttgtattcatttgatagtcagatgtaaattagttaatgaagtaagtccattgttccatttgctttcgtttgtgacctctccttatattttatattcaaactttatgtgcggggggtatgcacacctgtggaggttagaagacagcctgcctgccggagatggcttcttctaccatgtgagtcctggagactgaactcaggtcccaaggcatggcagcaggtgcctttatctgcttagccatctgccagccccttgcacctctttaagtgaaaatgtgttgaaatatattcatatgccataaactcagccttttagaatgtaaaatgctttatcatctttacaaggtcatgctgccatcgctgccctctagctccatgacatttgtcatcccctaaacaaaaccctgggcccatcagtgctttctggacccgtctcccctaaccgactaccgactagaaccttgaacctgtggttgtgttttctacagctctcgtggcgctctccttcagtggggcaattgggctgacttttcttatgctgggatgtgcgttggaggactatgggtaagttgtcttgaaaaagaaatcataatgtgtatgtgtccatgtctg

SEQ ID NO: 869 - DNA, 5163 bp, Mus musculus
cctcactccaaggaaggaagaagggcaaacctaggctccagatccggttccatgccatgttttggaagtcgtgtttacgtctgccttcatcctcatcccttccgcttcagcataagcaaaattataaccctgcacgctgacttgtatgctattatcatagcctggctgctcctgcgttgagggacttcgcccccgggatcgctgactgtctgtgaatgacaaatccaaagtcaggggttgcagagtcagccggacttgcctgctctcgtgcagcagcgggagaaaacagaatgaaagattctgaaaataaaggtgcctcgtctccagacatggagcccagctatgggggaggcctttttgacatggtgaaaggcggtgcagggaggctattcagtaacctgaaggacaacttgaaagacactctcaaagatacatcctccagggtcatccagtctgttagcagctacacaaagggagacctagactttacttacgtcacctccaggattatcgtgatgtcctttcctgtggatagtgttgacataggattcaggaatcaggttgatgacatccgtagctttttggattccagacatcttgaccactacacagtatacaacttgtcacccaagtcttaccgaactgccaagttccacagccgggtctcagagtgcagttggcccatcaggcaggctccaagtctacacaacctgtttgctgtgtgtaggaatatgtataactggctactgcagaaccccaaaaatgtctgtgttgtccactgcttggatggacgggccgcgtcgtcaatcctggttggtgctatgttcattttctgtaatctctactccacgcctggccctgctgttcgattactctacgcaaagcgaccaggaattggactgtctccgtctcacaggaggtacttaggctacatgtgcgacctacttgcagataagccctaccgccctcacttcaagccactcacgatcaaggcaatcactgtcagcccagttcccttcttcaataagcagagaaatgggtgccgcccttactgtgacgttctgattggagaaactaaaatatattcaacgtgcacagactttgaacgaatgaaagaataccgtgtccaagatgggaaaatcttcatccctctgaacatcacagtccaaggtgatgtcatcgtttccatgtaccacttgcggtcaaccatcgggagccggctgcaggcgaaggtgaccaacacacagatattccagctccagtttcattctgggtttataccactggacacgacagttttaaagttcaccaagcctgagctggatgcatgtgatgtaccagaaaaatatcctcagctgttccaagtgacactggatatagaagtccagccccaagacaaagtgatcgacttaactccaccatgggaacactactgcacaaaagatgtgaaccccagcatcctcttctcctctcagcaggagcatcaggacactctggccttaggggatcagaaatcagagaagtcacgctgtgaggaggaccacgctgccctggtgaatcaggaaagtgagcagtcagatgatgagctactgactctctccagcccccatggcaatgcagagggtgataagcctcatggagccaagaagccaggcaaaaagcagcaggagccagctgcgcctcctcccccagaggaagtggacctcctgggcctggaagggtctgatgtgagcacgaacttctcttccttggcagctcctcccagcaattctgagttgctgagtgacctgtttgggggtgtaggtgccacaggtcctgctcaggcaggacaggctggggtagaagatgtgtttcatcctagtggacctgtgtctgcacagtccacaccgcgccgaaccgccacctccgcctctgcatcgccaaccctaagagtgggagaaggtgccacctttgacccttttggagcccctgctaagccaccaggtcaggatttgttgggctcctttctaaacacatccagtgcttctagcgacccctttctgcagcccacgagaagcccttcccctacagtgcatgcttctagtactcctgctgtgaacatccagcccgacattgctggaggttgggactggcacaccaaaccaggaggttttggaatggggagcaaatccgctgccaccagcccgacaggctcatcacatggcacccccacccatcagagcaagccccagactctggatcccttcgctgacctggggacactaggtagctcttcatttgccagcaaacctaccaccccaactggattgggtggaggatttccacctctcagctcaccacagaaagcatccccccagccaatgggtggagggtggcagcagccagccggctacaactggcagcagacacagtctaagccacagtccagtatgcctcactcctcccctcagaaccgacccaattacaacgtgagcttctcggctatgcctgcagggcagagcgaacgtggaaaaggatctactaacttggaagggaaacaaaaggctgctgactttgaagatctgctttctagtcaaggcttcaatgcacacaaagacaaaaaggggcctcgaacaatagctgagatgagaaaggaggagatggctaaggaaatggatcctgaaaaactaaagatcctggagtggatagagggcaaagagagaaacatcagagctctgctttccacaatgcacaccgtgctgtgggctggggagaccaaatggaaacccgtgggcatggcggatctggtgacgccggagcaagtgaagaaggtgtacaggagggctgtgctagtggtgcaccctgacaaggcaactgggcaaccctatgaacaatacgcaaagatgattttcatggagctaaatgatgcctggtctgaatttgaaaaccaaggccaaaagcccttgtattaatttgtgagcttttctatgctggctgcagtcctgtgataatgcttagtgtgtaccacagttctgagattttcacagatgaaccaaaaattctagtaatgtatttccaatactaaactgttaatttcctcgtgaattcacttctcatgataaggaatgtgaacgtttggtttcttgaagtccatagcaccaagaggaactctagtgagctgaccttgcagagtcttgacattccagcctgtcctttgggaagccgactcagcattttgcctggggaaataggacctcggccacccaaggtgaaggcatgacatccatctcactgtctgagattaagatttatgagtggacattatgataatgggattgcgtaatggttttaaggaattgatttagggattgtgtatgtgtgggttttttgttttgttttgtttttaaagatgtaatttgaggaatggctttacacaaactccaagaatatcaccaaccaagtattttttaatggaaacttactgaagcctttagcttcttcagtgtgtgtcctttggtcaagagcattaacaattattgaagtgacttaacggtggaaaggggttatgtagaaattgaggaattacccctttcttttcctggatgagctataacccaagcacatgataaagaaatcaggagccctaagatgccaaatcttgactccaggtcaggacattggggtaccagctcctttttcctttaagtttgctgttgattgaagaaaaactcttgaacgataccaccaccataattccaaacctatttgaaatccccttctaattgttgccatgaggctcagtgctctttcttttgcttagccaagaaaacattcttcatgggtgacagtttgcaaagcagcttggcccattcacactttgtatagacctggcattctggtgactgcaagccaggggaaaaacagagaagataacactgagtgctatttagaagggtttggttggggatagagctgtggtgtgccttcagatccaattggatagcttgccagttgaggagtcagagtcccacccacccagtggatctggcccctcccaccccgggattatctccgctgggtttgctgttggatgcatgtgaaaactatgcaagaatgaaactttcccagactgacatcagctggtggcagttcactccagtgctcagagcttcccactttgcaggggaagcagctcctactgctgggacttcgctaggtctctgggtgagcacatgtgcggcatctatttatctatccatacctgcatatgaatatgtctaacgtgcacacacacattcacaaagcaggtggtcaaaaagattatcatgctgatcttaaaaggttcacattcaatattgtgaaaagctttcagaagttgtgtttccaagacaatcattttgtttgtttgtttctgttttaatattcttgtgacaactaagttgaaaaagcagcatgtcagaaataattttgattctatatagacctcttctctttttttaaattataaaagtttattatttattttacctttaactgataatgtgaaattctcaaaaatatgttctctttaaaatatacagttgtaaactcttcaaagtaaacataacaatctaggtgttatttattaacgtattatacaatgatgtctgacccagtatgtgcttgtcctatttaagattggaatgtgagacatgttgctgtgacctgttttgttttgtttttttgtttgttttgtttttgcctcattccatatttgtagatattgtgtgaactacagtatataatgacaataattaagaggatattatgtggctgtcacatacattttgagatgatagaactatattagctttgtgtcatgtttgcataggtcattaacgttcacggtttaaataccattaaatgttatgcgattagcaatgaggaagaacccttccttaaatctgggagtttcccaccgctctttccctgatgcattatgatcctggacgcctgtctatctcaaaactcttaacacgtgcagaccaataggttctgtgttccttttaaataccaggttgtgacagtttgttgttggccagatccaccatctcattcatatttattgtaatatatttttgttttgtaaatacatgaaacaaaacaaaatgtcattgttctaaaatatttgtaatgtatattaaa

SEQ ID NO: 870 - protein, 901 aa, Mus musculus
MTNPKSGVAESAGLACSRAAAGENRMKDSENKGASSPDMEPSYGGGLFDMVKGGAGRLFSNLKDNLKDTLKDTSSRVIQSVSSYTKGDLDFTYVTSRIIVMSFPVDSVDIGFRNQVDDIRSFLDSRHLDHYTVYNLSPKSYRTAKFHSRVSECSWPIRQAPSLHNLFAVCRNMYNWLLQNPKNVCVVHCLDGRAASSILVGAMFIFCNKTPGPAVRLLYAKRPGIGLSPSHRRYLGYMCDLLADKPYRPHFKPLTIKAITVSPVPFFNKQRNGCRPYCDVLIGETKIYSTCTDFERMKEYRVQDGKIFIPLNITVQGDVIVSMYHLRSTIGSRLQAKVTNTQIFQLQFHSGFIPLDTTVLKFTKPELDACDVPEKYPQLFQVTLDIEVQPQDKVIDLTPPWEHYCTKDVNPSILFSSQQEHQDTLALGDQKSEKSRCEEDHAALVNQESEQSDDELLTLSSPHGNAEGDKPHGAKKPGKKQQEPAAPPPPEEVDLLGLEGSDVSTNFSSLAAPPSNSELLSDLFGGVGATGPAQAGQAGVEDVFHPSGPVSAQSTPRRTATSASDTLRVGEGATFDPFGAPAKPPGQDLLGSFLNTSSASSDPFLQPTRSPSPTVHASSTPAVNIQPDIAGGWDWHTKPGGFGMGSKSAATSPTGSSHGTPTHQSKPQTLDPFADLGTLGSSSFASKPTTPTGLGGGFPPLSSPQKDQPMGGGWQQPAGYNWQQTQSKPQSSMPHSSPQNRPNYNVSFSAMPAGQSGKGSTNLEGKQKAADFEDLLSSQGFNAHKDKKGPRTIAEMRKEEMAKEMDPEKLKIWIEGKERNIRALLSTMHTVLWAGETKWKPVGMADLVTPEQVKKVYRRAVLVVHPDKATGQPYEQYAKMIFMELNDAWSEFENQGQKPLY

SEQ ID NO: 871 - DNA, 171158 bp, Homo sapiens
  misc_feature (1)...(171158): n = A,T,C or G
cggccctgggagcctggatgcctaggcgacgcccgaacccgaccctcggtcgcgggtaccgggaccgctggggaagcgcaggggctgatgtcggcacagtctcctttcctctagcccctgctcgttgctttggctctggacacagggaagccacggtggcgcggcgacacagcctcactgaggttagcttgtccccggcccccagcacctggcctggcgcctgcaatgcagtgcctactgggggaatgaatcagaacccgaggctcccttcaaggtcctcccgccctgtacccacctcctctctacctgcctgcggtgatttcgaagctctcgccacgataaactatttccaagcacactcagtcctgtcctcgccagggcctcaactcacagccaatcactgactcactccattcattcattccacaatttttatcgagcccctccatctgccttggccggagaacacgatgggcaaagcccggatcttggaactacttctagagaggaagacagacattacacacgcaaaacagagaaagcccggtacacattgctatgtgcgcttagagggaatcagtctgctgacagaggaaaaaaggcaggtccccgagcttccatggcaggcggactgggaaggcctctccgaggcattgcaagtcagcggagacccgaggactgactaggagttactctagcgtgaagccgagtaatagagaatagcaagtggaaaggttcccagagtgcctgaattgagcaaggggaaagagagggatgcagggcctggatcgaggtctgggcagaacatgaagaggagttcggattttattctacgtgagctgggaaaacactgaagtgtgctaagcagggaagtgacctgatctgggggctcccggcttttctctgtctgcagtgtccatgctcgcatctcagcctgccggattcctaccctcctgccaagactagcacaaatgcagtctcctcgctgaaatctctgtggttcctgccacctgtaacccctcctttagcatttcgtcacctgtagagcgtttgtcactgttcatctggtattaaagattccacattctcatccatttcatctttgcatcccccacgaggctaagtgcagggcttggtactgtgtagatactgcttatgaatgtgtcttgtcttgtcctttttgtctgtttccatcatctgaggatccttcctctggggggttgacatgccttatttctaaaatggccgaccggatgcagggcagagccagattgcaccaggaccctgccatcgatatagtccccctcacccacccccggtgttttgaggattaaataaattaatgaattaaacgagttagtagttataaagtgttagcacctattaagcattataaaaataaatttgaaaatgaccagcaataattatctttcaaatatttatttattgcattggaaacaagcttttctattggtggttgttagggagactctgcagcttgtcattgtcatcttgccggcttttaagtatgtgttcctactttttaaaagtcagtgcaccaacaaaattctttccatactgtcatcaagaactattgctgaggccgggcgcagtggctcacccctgtaatcccagcactttgggaggccaggcggacggatcacttaaggtcaggagttcgagcccagcctggccaaggtggtgaaaccccgtctctactaaaaatacaaaaattagctgggcgtggtggcatacacctgtagttccagctacctgggaggctgaggcaggagaatcgcttgaacccaagaggcagaggctgcagtgagctgagattgcaccactgcactccagcctgggccacagagtgagattctgtctcagacaaacaaacaaaaagaactattgctgaaacttaatagggccgaaggctgaccactttttatcatgagcttgaatgagatcgatgattgcaacaagtattccttgagtgataattacatgcatagtgttattccagatgttgtgtgaatgcttacaaaagaggaatagatgaatattgccactgtagtaacttggattagaataagtgttctagttttataatttttattttaatttttaaaatctttaaagttccgggatacacatgtaggatgttcaggtttgttacataggtaaaggtgtgccttggtggtttgctgcacctatcagcccatcacttaggtattaagcccagcatgcattagctatttttcctgatgccctccctcccctgccctcaccaccacgggccccattgtgtgttggttccctccctgtgtccttgtgttctcattgttcagctcccacttataagtgagaacaactggtgtttggttttctgttcctgcattagttttataatttttaaaaccagatctttagtgcctatacaaccatctccgcttctgcgttcctgacctagcgtttactcacagcttcccagggctcattgccatcccacacctctcttttcttagataggatcttggctgctcactacattcctctactatctatcttccccttcccccataagccctggggataaagccattataatatctaatgttacatgatacttgacatcttatagaatagttcaactacaggattttgtttagatcttgacaatactcctggaaggagagagggcagatgttatgtatttcccccattttatatataagggaaggtgaaacaagcggcactaagtgatatgctggaggtcatgtgactggtgagtgtcagactcaggcctgcctacctatacaacatgctttctgccacatctccctccacacatgaaaaaacatgtttcaatagctatactcatggaagagggaagtaaaacgaataaatattatgcaataaatctatatctcaattttatttgattttttaaagttaacctgaatttcttatgatgatgttaacatcactttgggcatctagaatcatacactttgacatcacacaggctatgatttaaatctgccactaataaatggcacattaataaactgtgtgatatcagacagcatccttagtctttcaaaaatggagttatatattatctgaaaaatgaggatgacaattcctatgtcatgtaactgtgatgattaaatgcatttctggtacatagaggttcacaaagggctggttatttttaaattaatattaggtttactattgtatgtattaatattaataaaacaaaacctaatatggttgaaaatctagactattcttagaaaatagtctagaaaacctagaaaagtctagaaattattagcaaaccataatattaatatggctgaaaatctggactactattagtatactattgttagtatagaataataatagtctagattttcataagagtccagactactattagtctagattaatgcttagtctagatttcaaccatatgatcacactcaaaatatgtttaaaagttcagtgtgctctgggaagcaaccacagctggaggcttctttgaggaagttaacccttctgggtcaaccagaaggtcttctgcagcagcatccatctttctaccaccttcttctttttcatcaggaggctgcaggggagaaggaacatagcttctagggactcctgtcatcttttcatgctaacactgtgtcctgaacatagcagacattcaataaatatgtctggaatgaaagattcctttcatttatatatatttccaaagagaatgactctgaaatttacactgtgaacatttgtcactaaaaatatagcataaatatctagaaggacaattactgcatcaaagtgtatatatatatatatatagttttgattttgagagatattgccaagttgacctttgtacatttgtgctaattcagtttctgccaacagtgtgtaagctccccgattccttactgaatatggtcagacttttaaatgcttgctaatttgatgggtatgaaatgatattccatgttgttttatattgaattttcttgatgaataatgaagctgagtatcttttcacatgaatattggccattcttgtgtgaacctttgtgaaaggcctattgatgtctttctcatttctttaacttgggttttttttttttctatccattttaggaactctttaaatattctggatatgaattatttgttggtttagaggtctaaacaacttttaaaaatgtacttaatcatgccagtagttctaaatgggaatatgaacaagctgtgctgagttgaaattaaccctccaaatgcttccgtccattccagagaaccatattttactcaaatatcaaagtccgtaggttacagaaaagggagcaaatgacaaaagcattttatgagcagtagacttctctagcccttgaattatggtagataactagccttgagttcctgccaccagaaattccctcctctaaaccctgtggtggttgaggagccctttcctgagctgtggtattctctgggaagacacaggttggaactagagtcagtttccatcagtagatagtattttgcagaacaatttacttggagaagaaagaggacagaatttctgtcacgtcgatcagtggtttattctctcactgccattgtctagccatatgtccctaaaaataagccacattgaatggatgtaatgatccctacccagcctattcctaaggatattagagagatcaaatgagaccataaaaatgaaagggctgtgtaaatacaaggtttgttagccaggctctgggaagtaaccaacactttgtcagagtgggaaaacctcactgacccacaatctttgggtctgtggctctggcccttctcctaccacctgttctgcatacaggtgcatgattgtagagagctgtgcttctccaaggttggtctccagaccagcagcatgagagcagcagcatcagcatcactcaggaccttgttagaaatgcaaattctaggcccccatctcagagctaccagatcacaaactgaggggtgggaggatggggagggataggaggctggaacctggaaatgtgttttaataaactctgcagtaattctgacacatgctaaaggttgagaaccactgacttagtaggatgagcaagggttttacagccagcaaatgtgggtttaaatctcaactctcctacttgccaacttgtgacatgtaaattactagaccgtcttgggtttccaacctctcaccactaaaaggaagaccgagtgtggtgtagcaggtgaagccactctccttccttcccatttcctttacaggactgtgtgagaaataaatgacatgacgattctggactctgctgtgtttagctgtgtgtctcctttggcaagtctccttgcctctctgcctcatttttctcatctgacaaaacaaatggcaagagttaatgtgtgcattgcttttgtcacactatgtgccagccactgtcttaaagagtatgtgattttattttattcttacaataaacctgttttacagctttcattttacacataagaaaaactgaagcagagagaggttaagtaacatttccaaagttatacaactagtaagttgggattcaaacccgggaggtctgctgtgagtccttgcattaaagacaatgcttgccaagtaataagttctcaaaaaatggatgatgatgatgatgataagaaaatagcctggcatatagtaggtactccatataagccatgctgccctcttctgtggctagccctaatcctaaacatctatcccctccccgcagtaagcacattttctttttccttctcacctcttttctggccatttgggtgctctgagcaagccagacagaggcttggctggatgcggaaagaccaaatgtggtgttgcaggtgaagccactctttgggaatgaatgactaagctagcagaagctctagacaagttattgaaagatcatttcatctgcctaatttggaatatatattctgggtctctgcttacctatcaactaatcaagaattaaaatgcctcaaaagttccaagagagtgtaaaagcttttttttttggtgcccagtttttcctcagagtaaaatttgcagctgggaaagtttaatccacagtatgacagcagtgtttttttcctttcatttttgtttttttgctcagacaataaaaagccttattccctttcaattcagggtttcactcgttgttcttgaaaattcccttcagtttagctctcaagatggccttgcttgctgagcatgagtcactggtttagtgactcagagtggcatctaacaagacaaggatgtgcagggttgtcaagggacttagtggccagtggagcctgcctgaagcttttcctaaacccagtttttgagatagagcatcttttccattagcggctgttcctaatcatcctcagtaccagtttatctgaagcttggggtctgacagagacattgccttgttgtggaaagctctagaatccatccttgtccttaactggatgtggccttgagatttactgtgtgacaggacaagacttctgagagttcacccagctctgcttggaacggccgcagaatcaggaggcctgtgcttctggaaatatggtgtcaggagggaaaataaagcctctttttatttgatgaggccttcaaacctctttcaactttaggagaaaaaagatcaattaaagttggatagagaaacagacacatgtgatgaagcaaatatacccaaatatacttggatatggggcccactgtacaattctttcaactttttgatatgtttgaaacttttcaaaatataatgtttggtacaatgcagatacccctagaaatgactacacttttgaaaacattattccttttgcaatataaatgggtgttttccttcccttctcccacttcttttctactcctagcattggtctttttaaaattttggtctagggagccttcttgattaaaaagggcctggaatagttagaaagaatgaataagacctagtacttgatagcacaacaaggtgactagagtcaataataatttaattgtacatgttaaaataactgaaagagtataattggattgtttgtaacacaaaggataaatgcttgaggggatggatactccatattccatgatgtgattattatacattgcatgcctgtatcaacatttctcatgtacctcataaatatatacacctactatgtacccacaaaaattaaaaataaaaaaattttaaaaagggccggagtgagggtggttggtgattggctattcctttatgccaaagacttcatattcttcttcatatgtaattctcacaataatcctacaaactagttattaatttctgtattttatgaggaaactgaagcttaggggaataaacttgacccagttacaaggtaatactactcatcttacagcatttatggagcccttacttgatgtgtcaggctttgtgttatgaaccttaaacctattaacttgtttgagcctcacccagctgtggaaggtgggtaccattattacctccatcctgcagatcaggaaatggaaacttaagagaggcgcagcaacttgtctcagcttatattccaggggctggtacatggcagggcccatgtttgaatccattctctttatttattttttgaggcagggtcttggtctgtcacccagggtctttcttgctctattgcccatggctcactgcagccttgacctaccagactcaagcatcctcccatctcagcctcccaagtagctggaccacaggctcatgccaccatgcccagctaactaaaaaaaaaaaaattttcatagagacagggtctcactatgttgaccaggctggttttgaactcctggcctcaagcgatcctaccaccttggcctcctaaagtgctgggattacaggcgtcagccacctctcccagtcctcttctgctttagagctcttgccctactattcaaatccacgctttggcatttctttgcctactttggtaaattggcatatctagtggaagcctcttgacctgaggccacaggctcctgaggacagagaatgttttgttcagcaccgtgtcattcctagtgttcatagcagtgcctggcaccatgaatattattgaataaaagagtgcatgaatgatggcttctcaccacctactccctcaccttctcagccccccaaagtgctcctcttgggcacattttggctatcctggacttggtccttggagataaagatgccggtttctctgatgtggtttagccaatgtcgcatttggtggccagtaaggagttgtaatgaaggcagattttccttattggtcttaagctgtcaaagacagcagaaagatattatccacagccaaggaaagatgggaaccaaaaacaaatacttaaagtttcccaaaactttcaaggaatcttccagctgtggcaacaagaagtccttagtagccatgaaagctctcacattatagctatgtttgactcttgggttgaagtaatgaacaggtgaacactgacaattagtcctcttaaatgtgcccaggcagttggtaattataccctgcatttatttagtgttttgtttacaaaattctgttctcccttttgatgatatgaacagcccagtacatatataggacagctatgattattcccactttacagatgagaaaactgatgccagagaggttctgtcatttgccctacactacgcagctaataaaaggtagagacagtagagacaggtcttcaacccttttaatgcctagtccaggaaatttttaatatcaatattgcatttaactcagtaatttctgaggatgagtaacaggaagatgtattcctttctgttgctcttcttccaatttagttaggttacgtatttgagtcagttagtctttctggataccagtttgctaatctgtatcatggggaataaacaccatccatcagtgagtatgcatgaagcagaggagactgggagggttcagaacttaaaaaacaatttctgagtgaagctgtttggaagagactgtgatgactcttacctattatccataaaacaaattaaatggcacctcccttggcaaccctacctaaaatggcacccctgttacctcattaccatgtttcatttttcttcacagcatttattgccatttattatatgtctatattacctgtctgaatcctcccaccagagtgcaataaccaagaaggcagggacctgaaaccctaagaggtggaatagtgcctggcacaaataaccacgtgttgaataaatgattgaattaatgaatgaatctgagctgtggaatgattcaaagtaagtttgaattgaatgactgaaagatttacttgaatcctccttgctccccaacagaggggtgttatggtttggcatcctcatacatattcctagtctgccactcaatggcttacaaccagtcactaaagcctccttgagtatcaacttaggcctgggtgaaatgggttcaataacctgtgtccatgcagcagacacagcccattatattgccctgtatgcctctgtactgtaacagcctgtgagcagcgtgaggaccgagggctggtcctgtgcactgttgtatccccagtacttagcatacagcctggtccacagagaggtaaaataaatgttgaatgaatgaatgaaagtacagggctctgaatcctcctccaaagctgacttaccatctgaaaataaacctggtgcatggcacagacattcccctttcaattcagagatgaggaggcgctaaacagttggttccctatcctgagggaaggaaaggcaagcctcggctccagatccggttccatgccatgttttggaatttgtgtttacgtctgccttcatccccatcctttccgctccagcataagcaaaattataaccccgcacaccgacttgcatgcaattatcatagcccgagtgctcctccgttgagagacttcgcccccgagaccgctgactgtgaatgacaaatcaaaagtcagggttgcagaatcagccggactttcctgctcatttgcagcagagggaggaagcagagaatgaaagattctgaaaataaaggtaaggggcggactgcagaaagatggctaagagagggctaaaggctaaaagatgctagggatgcgatgtcactccacagacatatttagtttgtattaatggctagtttaaaattaccatacctatattaacattctagttatataataaacatgatgactttaaaaaatgactagcttctagtttccaaatattgtgtcattcagctttccatttttatagtcctaaatataactctatttttgcgttcttaatcttggctgagtaacacagctttcatagatttccttagactagctcccagatttttgataattttattttgggggtgttcacaatagttaataatgaatatacaggttttcaatgcattattagaattggaatatctgaaataattgggacttaaaacagtttgggttctgaaggcaaacgctgacggagaatcctttaatgaacattaatctttttagaagcgctccatggggagccgtcgctgaccttcagaactgtttatcttgcaaagaaatgctgggatgtaaactacccccactccatcagcctccacaccttacctccccctcacctcccaacactctaattctgttagagggatgggggaagagagaaacgaatttaaataaaaactcaaaaaaggaaagggctaaccgaaaaatgagccaaccaaattttaagttcaacaacaagcattctggaggattctggggttttaaattcggaggctccttaaatattctgccgcagttgggggaggagcgatggacccctaggtctccggaggctacacgtgttccccgatcccgtttccagggggagcccttccttcctattgcgctggtcgtgctcctggcccgcgtgcccaggaagggcgcagcggagtcgcgtgcccgtccgggcggaggacgccgtctccgcgcggcggtgccgggcccctgcttccggaacgctaattttagggttcgccggcccccctttcttttcacccgctttccgtgcgagccgctgcgcagcagtctgcgcttcgagtgcgctgtgttttaaggaggccccggcgctttccccttgggctcgggggcttgggtgcgcaggtgggggctggcacgcagcccgttgggcaggtttcgcgcagcgaccctccccacgccggagctaagttctttgggtgagacgtgcaacaacgcaggccccaaagctctctgcgcgcagcgccgcggggcttggccttctccagtcctcgggagtcagccaccgtctctggcttgttataggattcccacctcgtggtgggcaatgatatatacatattcaacattagaaaaagaaggaaaaaaaaaaacccactcacaatctaatgccaatggagagaatggtattttaatctacgaaactgtaatgaaggctcttaaacaatcccactttccataattgaggctttcaaaagggccaggtagctggtggtgtttgtattaacatctcataggctctggatcattcacagccacgtattgatctatgtggttttgacgtttaaattttaatgaagcagccttagtggggaagaaaacagctatgcatgtgcctggtaagggggaagaggacctgttcattcctgtttctaagccagcatcttaagagtaggtattacctgtgtgtgaaatcaaagtattttaaaattaactctaggaagaatgttggattttcctgtgttgttttcagtggttggagaaagggtttctggagagaaaaaaaaaattgcttatttgccaagtcatgctaggccatggacatgatttagaaaaaaaattaaagctgcttgaattggaggcccaggttaaggttaatattcaacattgtttgaaatggaaacactcctggtttctcagtgtatcagtgtgttttaagctcagatccccagcctttttctaaggagagttggtatttagaatttttttttttttttttgagatggagtcacgccctgtcgcccaggttggagtgcaatggtgcgatctcggcccactgcaacctctgcctcccaggttcaagcgattctcctgcctcagcctcccgagtagctgggattacaggcccatgccaccacgcccggttaatttttgtatttttagtagagatggggtttcaccatcttggccaggctggtctcgaactcctgacctcaggtgatccacccgcctcggcctcccaaagtgctggagttacaggtatgagccaccgtgcctggccggtatttagaatttttgttttactttgtactgggaagagccttgggttgggagtcaagattggtaggctctggcttgttcagttataactcatttgtgacctaggacaggactctatttctttgggtctcagtttctttatcgctaaaatggagagctattagactagattcctgtttttcagattgtgagtggtgagaaagcaacttagtgagtcttaggcaacattttagatcgatgaaatagaacagaaactgtcagaaatcattgcacatagcagaggtaactactgtttcccgaaacttctgttatagatatttatctttatgcatgtgggtataagccgtattctgacatcacatcggtttttttttttcctgtgagtttcagtcaaagaagtttgaggaacactgaaataaatcatagctcagtaatggttttcaaggagtctgtgaaatgcagctttatatgcatatatatacagacagagagagagagaaagagagagtcaatagttttcctcagatttttaaaggattctaagactccaaataggttatgaattactgtatttctaaggtcccccaggccttttccaagcctatttctttgagagcaaagtatccctttagggctgctgggagatgggtatgtgttgacagagaccagataagtgtatggtgtgaggtggtgtgtgtgtgtgtgtgtgtgtaggtgtgaccatagcaaccagaccgtgagagccattcctgggtcccaaattaccagttggtgtcctgaatatgagacataaaaacactaaaaattagagtctctgtgttgaaaaggaccacaacaaaactattaaaatattatgaattgtttggaagtcaattctttttgtaaagactgaaaaagagaatcaggtaaaattataagaggttgatggggcaaagaaatcaccaggatgttgcaggttcagaaagtgaatttttgtaagctaccatcacatgagtggttcagtaaatgttgacttgtgccttaagaactgcctgcctgccttttccatctttttagttcatcttagggacaattcagtgaggtttttaaatacaaaagacattgtgtaatattgatctagcatatctcaaaatgttttgcaagccaggaaaaagaaattaagtataaggcaactaaaaagaaaatagttgagtgagttaataagtagatattggcaaacatgacagctaattataacaataagaaccatagctcctatttaattaacaactgttatgtgaaaagctctctgggaggtgctttacatattgtcacaacactgcaaggtaggtggtattttattctgaagaaatagattaagaattttgtacagggatacatagctagttagtggcagagccatgattcaaaatcaggtctttttttatctccaaaaccattcacatggtaggcaagtacttgaaaataagtagccctgtactctgtaaaattacagtttttaataaaattgtcaacatttttagaattaacttacctatataaaaagggagatgtgaaccttagaaaatgatggcttttgactaattttttaggttgtttttatttggaaaacagatattttaactcttcaaattcagctccaaattttctttttactaagttctttgagtatgttatgcagcaaggtcttagaggcacaaaataataagaatgaagactgaaaatttgggtgaatttttttttggtctataagaggtcaaagaaaatagttctcattccaatttttctgttatttttctagattttattttaaaatggcaaacatggcatttgtttagcaaacaaagttacacataacattttaatagtaggatttaaaagttgtcatgactgggcgtggtggctcaacctgtgatcccaacactttgggaggctgaggtggcagatcacttgaggtcaggaattcaagaccagcctggccaacatggtgaaaccccctctctactaaaaatacagaaatgagccgggcatggtggcatgcacctgtaatcccagctactggggaggctgagacaagagaatcgcttgaacctgggaggcggaggtttcagtgagccgagatagcaagactgcactccagcttgggtgacagagtgagaccctgtctcaaaaaaaaaaaaaaaagttgtctatgccaatggttcctgagataacttttcactggaagttattacaaaatctaattgggtttgagcagggtcagattcagacttttaggctctaaatattaaaaaatagtgtggtgttcatcctccaatctgtaattcaaaataagtgtaaaaaaatttttaaaaagttgtgatttttcttaaacatcttgactactttgatacttttagagaaaactcaaattctttcgaggatttttgtcactgctgcatgtgactgggtgagttggtgaaatgatactttagctggggtgatctgtaaatgactgagtgacttctcaaagcttcaggggtagcatgtggttaagctgggattagagactggtctatgccagtggtaatcaatgggtctggtattgctttttgggctacacactggaaatctgcaggtatgttatttgatggtcatatgattgaggggcgctgccattggcagaaactagaaatgatagtgccctccggtgttctgggctgttccattcaatgatgaattagctcatgtcctgtgcaattttcaaatgttttgctgaagatgtagtaaaaccttctatacttttctgggcttagaacataaattggtttcactgtacactgaaacttccaggattaaaaatgctgtgtaaatctaaggaagattatactgaattttgttcaggaaatcacttacccaaagcaatgccacttgtgttttagacaccagtacaacacacctgaatcataaaatctatatacaagtgcaagtagctacctacttaattatgttttctaatatagtcgtctgagcatttgcatattgaaatacatgttgctttattgtaaataacttatttcacttctcttttacattacagttgaaacgtatatgtatatatatatacatatgcatagtttaattttgtgttaggttatttcatctttaaatttcattttgagatactaaacaagaaaatacaaaatatttttatatgttactcagagtttaaaaatgacttgatttttacccctgaatgttttaaaataatttgaaccaacattaaaacttttggagactataggttcaataaggtatttatggcttctttaataaagattagagcagtctgcaacaatgagattgagctgagtataaattaccctctttaaagggaagatatactgggttataagggttataaatctctaaaagtgatgttactggtcgttgattatttttatgctattgttactgccacttacatttttattttttgttttactattattatttttgagatggagtcttgctctgtcactcaggcaggagttcagtggtgtgatcttggctcgctgcaacgtccaccttccaggtttaagcaattctcctgcctcagcctccctagtagctggaattacaggtgcacaccaccacacccagctaatttttgtatttttagtagagacagggtttcaccatgttggccaggctggtcaccaactcctgacctcaagtgatccgccacctttggcctctcaaagtgctgggattacaggtgtgagccacttggcctggcaaaattttttttaaacattttatttatattctctcagcaggacaatcttcctagcataactgttgagggcccctccagtctcaggttttgaccttgttttttatttttttttattaacttaaaaaacattattattttttcatttttatttttgacttgacgataactgtatatatttatggggtacaatgtgatgttttgatagaaatctacattttggaatgatcaaatcaggccgattagcatatttatcacctcaaatatttatcatttctttgtgatgagaacatttaaaatcctcttttagtaattttgaaatatacaacacattattattaaccccagtcacagtgctgtgcaataggacagcaaaacttattcttctaactgtaactttgtgcctattgatcagcattgcccctttccctgcccatgcccccacctcccagcctctagtaaccaccttttgattctctaattctgtaagtttggcttttttagattccacacacaagtgagatcatatgatatttgactctctgtggcactttagaatttcattttctaattgtttattcctgggatgtagaaatagaattgattaggccgggtgcggtggcttatgactgtaatcctagcactttcggaggtggaggcaggtggaacaccagaggtcaggagttggagaccagcctggccaacatggtgaaaccctgtctctactaaaagtacaaaaaaaattagccgggtgtggtggtgtgtgcctgtaatcctagctactcgggaggctgtggtgggaggattgcttgaactaggaggtggagattgcagtgagccaagatcacaccactgtacactccagcctgggcaacagagcgagactccatctcaaaaaaaaaaaaaagaaagaaatagaattgattttatatgttgaccttatttcagtgaccttgctaaattcacttattaattgcaatagtttttagattttaggggccttactatgtagaccgtttatttttctgtaaataatgacagctttttcttctttctgatccttatactttttcccctttgtctcattgcactagctaggatctctcttataatgttgaatagaagcagtgatggtgagtattcttatcttgttactgatcttaggggaaaagctatcacattttcaccattaagtacaacatttgatgtgggatttatatggacacttaaaaattagattaaggaagttaccttctattcctactgtgctaagtttttatcatgaatcagttctgagttgtaacaaatatttttctgtattatgtgcatcatatgattattttattctgttaatatggtgaatttcagtgattcttgaatgttaaaccaactttgcacttttggaacaaacaacttcgttgtgatatctttttatatattgctgtatttgacttgctaatattttgttgaggattatctttgtccatgagagagattaacctgtgatttccttttgttgtggtgcccttgccacattttggcatcaaggatatgttgaccttgtaaaatgaattaggaagtatttcctatttctctattccctggaaggtttttgtgagattagaattattctttaaatgtctggaagaattcactggtgaagccatttgggcctggaaattttgttcttggaaggttttaaaatatgttttcttgtttgtggtgtttatttattttacttttgtaaagatgaggtctcactatgttgcccaggctgatcttgaactcctgacctcaagtgatcctgccaccttggcctctcaaagtgttgggcttacaggcgtgaaccactctgcctggcttcagttgttttaatagtgtatgttattcagatttcctatttttgtgtgtgttttaataaattctgtttttttaggaatttgtccatttcatctgaatttccacatgaggttttctttatattctcttatgatctttaaaatgtttttaggtggtgtggtcctgtccttgttttttatttctgatagtggcatttctatttattgtcctggtaattctcacttattttgatgcaatattgtcaaggtcttatgcatttgagtagtctctgtaatcttttactggttaattttttgtattatacatttatttttcatctcatgagttcttgcttttgtctttattatttcctcttacacgctttggctataacttatgacttattttttagttttttgagatagaaggtatctttgattttcagcttttcttttaaaaaatattttcatttaaggctacacattaatatcctttaagccggccaggcgtggtggctcacgcctgtaatcccagcacttttggaggccgaggcaggtggatcacaaggtcaggagtttgagaccagcttggccaatgtggtgaaaccccgtctctactaaaaaattacaagtattagttgagcacggtggtatgtgcctgtgatcccagctactcgggaggctgaggcagaattgcttgaacccgggaggcggaggttgcagtgagccgagatcacaccactgcactccagcctggatgacacagcaagactctgtctcaatgaaaaaaaaaatcccttaagctatatatataatatcctttaagcatagcttttgtgtacacctgcaagtattgttatattttcattatttagtttaaaatattttatacttttctttttgatttttttgacccataaggtagtgtaacaacatactttttaatttttaaacagttggggagtttctagttctctttttgccattgatttctagcttgctttcactgtagtcagagaatatattttggatgacttggaaatgttttagacttgctttgtgacccttcatatgatcaatttttatatttatatgttgtacttaaaagaatgtgcatactaagatagtttggttccatgttctatatatgttaattatttcaatttgttaatcctgaggtgcggatcttctgtatcctcactgatttttttctcattctgttggttcccaagagagggcaaactcttccattataattttagatttgtctatttttccttttatatttgccaatttttgctttactttgtggctctgttattaggtgcataccatatacagttatagttgttatatcttcattatgaaatgtctttccttatcttgagcaatactcccttataatctacctttttgatattaatgtagctataccaactttctttgtgttaatagatacatggtagatcttttcccatttgtatactttttcttttttattattattatatatttttttgagatggagtcttgctctgtcatccaggctggagtgcagtggtgtgatcttggctcactgcatcctccgcctcctgggttcaagcgattctcctgcctcagcctcccaagtagctgggactacaggtgtgtgccaccacactcagctaatttttatatttttagtagagacagggttttgccatgttggccaggctggtctcgaactcctgacctcaggtgatccactcaccttggcctcccaaagtgctgggattacaggcatgagccactgtgcccagcctatactttacttttttctatacccatatatgtaatctgtatcttttagaagcagccataagtgaatttttaaaaatctagtctgacaatatggtctttagtttgaatatttaaaccatttaatataattattgatgtgttaagtgctatagctaccatgttactccttgtttcttatttgtgtcccatctgttttatataccactttcttttggattaatcaagcattatttttaactttccaacatattctttacacatttgttttcattttacttttctttgtgtgtatgtgcgtgtgtgtgcctgcgtgcgtgtgcaagtgattaccccagtgcttcttatatttaatcatgtttcagacaatgttaggcgcttagaagactttaactccatttaccctatcttctccctcacctcactttctgccttttgtattattattgtattttgttttaattatacatttattaaagccccataggacactgtaatgattgttttatggaataaatattcatttaaatttacccacatatttaccctattcattgcttttcatttctttcggattttttgtgtattccctctgggatcttttccttttgcatgaaaaaaactccctttaggatttcttgtagtgcatatatgctagaaacaaatattctcagtttttatgatctggaaatgagttgattttgtctttgcttttgaaggacaattttactaggtgtatagaattatggggaagcaggtgttcccccagcactttaaaacatgttatcccattgtcttctggttttcatcctttcttggaaaagcaggctgtcagtcagtcttatgttgttatttggtgttgcatcttttttcttcggctgttgttaagacttttctcaattgatttggttttcaacacttgtcccaggtgtggttttctttgtatttatcctgcttggggttttcagtccttcttgaatctgtgcggcttgaggttttttgtaattctcataattccctgccattatctctccaaacagtgttttgttcctttctctctttctgggactccgggtacctttatgttagaactttttaccctgtcccatatattccttcattttctgtatacttagcccttttctttcttttttagttttgttatttttttgctggcctatcttagagcttactggttctctctgctatgtttaacttgttgttacagaaccattaatttcttaattttgttttgtatttttcagttctagagttactattagattctttttttttttttttgagacagagtctccctctgttgcccaggctgcagtgcgatcctggctcactgcagctttcacctcctgggttcaagcgatcttcagcctcctgagtagctgggattacaggcatgtaccactatgcctggctaatttttgtatttttagtagagatggggtttcgccatgttggccaggctggtcttgaactcctggcctgaagtgatccgctcaccttgacctcccaaagtgctgggattataggcgtgggccaccgcgcccagcctctattagattctttaccaaaagagattcttcaccttgtcatctgttttctcaaatacatacatcacagtcatcttaaaaaactttgctcagtaacttcaatgtgtgggccacttgtgagtctttttatctcttctgtttttcttcttggttgtctttcttcatatgcctggcaattttttattatatgtccagtattgtgtatgaagatgctctggatgatgtcatctacctgttgagagtatttttcctactctttgtcagaagtagaacagagatcacttcaatcaggcactcagtctaattaaggctgttttgcagacttttaaggtttagtctacttctggttctcctaatcccaggcccctagggaaactgactgagagtctgagatgtttctcaccaccccttccccttgacagaccctaaactctaatttttgtctctctaatactgtgaacttgctgaaaactctactcagcaaaatgttcattgtgcttttcatttgctttctcgttggcttcttagcctctgctctgggcagctgagtcaggaatatctgaaggagaaaactcctgtcaggctgtgagttactctaggatatgccttttcagtcctaaactccactttttgtctctgcagcccttgaaactgtctaaaattctgcaggcttctctgtgtcttaacagctgccccttgcctggcttttcagcttcttaccccatgctaagaattggcatataccctaaataggaaaatgggcttgcagaaagtcaggctcacctcagtgagcctcccctctctccaagatctggttcctcaaatcgtggctgattagtagctttcctattacttcacacagatgtttaaaaattttatctggcttttctaatttccctcatcagaaccagtctgctacaacctactctattaaagctggaagttaaacacgtctgtttttttttgtttgttttaagtggattatgttaaaaaataaaaatcacaggccaaaaaccaaggtaacaatgtcattttaaacatgtaaatttaataaaggatatatgttgatttttagttactctttcttgccttattaaaagcttgtcagtaccttttttcatatgtactctgaaattcttacaaatatatgttgctttgttccagagaatatgtgtactaaaagactataatttttctgagtctggttctccattcaaatgttttaatacttttgtgattttatgatttgtaattgtcgactctcacctcccaattcaacatgatcctaaaatgtacaaaataatttgaatgattgagtttcaaaaagttttagaaaacttgatcttgtaacttttattccaaagctttgttgagggggagaagtacaggcttctgcctttaagggtactgcttcacttttggggcaaaaaagcaagggttttcaaagggggacttgacatgaatggcatgcaggggagggggtgagccagtgggggtctcaatgacttgctttggtgctttatctaccaggtggttgagctggtgccctcgcgggcagaactaggtggtaaggtggccagagtcttgagatactctccaagtgggagtgagtttcatcatgggcatactttaggttataatttgttatctctcgaggcagtctcctggtcgaagagacgtctggctctggagcttctaagtaagcaagagcttccaagtaagcacacagataagcttgccctacagggagtgtctggtgaaggaaaggtaaatgttataattgcatttctaaagagctaagtaggaagtggggaacaagggaaaaggaggaaacagaaaagaagaaaaaagtattttttaaaaaagtaattctttctcttagaaaaaggtgggtacttggttacagtctaaaccctttaccgtggctgagtaggtattttttcagcctctttcccaggttgcgtgctgcgtttagtgctgtcattctcatgtgcttcatgtcactgccaatgtgttcagcctctcaaatgcaagctccgttcatttactcattcatctcatatgtttttgatcacttatgtgctcaggtctcctttttcaaatcaatattatggcaattctagtaaatgatcagggaaattaaataggtcaattcatgtgacatagttctgaaaggcaacagagtgattggtggaattgtggaaatgtttttcacatttctccaaattttcttttaaaatcagacaaacaaactgacacttacttttcagtcttttcagatatgttccccgactccgactctagtacttgaaaatgtactaagtaagagggctttgggatgccagaaatagtctgttacttaatctggctgctggtttttaaaccagtgtgtgaaaattcctggagctcagcacatggtttgttcacgtttcagtatgtctgttatactttaataaagaaaatgaactttttactgatagagtaacaaagaaagtgccaaagagaaagaaagcttgagaacctctgatcaagttcagcctcttcatgttatggacgagggaattgaagcttgggaaggaaaaattacctggggactgggggaatgtctcataaccaggacttgtactcaggccttctgactcctagttcatctgactttcctaactcattgatcaggaaaggggtggggaagaatctggcatgcgctaacattggagctgggcgacattctcagaatcccagatgtatcctgcgagtcagcacttcactccctactctttctgccctcctccatccccttccccatggcagtttaaaaacagacacttttatttcctgcaaacctggagatacttgtttcatcacctaagaatcatttgactgcatatgctgagaaaaagggaaattcgtgcctgtgaaatctaacaagagcccagcacaaggtatgtttgatcctcttttaaagccatttttagtttggtgctgtgtggtttaaatttagaataacatttctacaactttgggggaggggcggtgatggtggcgtgcagagattgaacccagctgtgactcctgctgctgtgagataaatgggaaaatctgggaaccagtgttaaaaggagagggctctttagagaggtagctgcagggaaggggacgtgccttaattgggatgggggtggaggtaaggccaagaaacagtgggagctgtctcctccccctcttgccctgtgggatctgacctactgaaaacagagtgaagactatttctgatctggtttggaaatccagaatttaatattaaaatacacgttaaatatttcaataaataaatattaatatgttaatattaatgttaagtcagaatgttaaaatatacatctaatatatatacacatacatgcacatgcatgcacacacacacagcttggaattggtagtgtcatcctggcttcattttacattctcaaaggctagatgttgggtttccagagtgctgtttcttctgcctgaaatacattttctctcctatttgcctggctcagttctgcttctctttccagtagtagcttcctctgactctaggtctccttcccactcgctgcctataacaagtttccagagcatcctgtgttttcccttttgtgtcacttcccgtatttttaattattagatgaaatttgggcacggcatatgtccttaatacatagagaaaagaagagaagacaaggagtcagggaagacaaaagaaagctacccttggatcgcttcttttaaacttagcaaggtagacaggttccttaacttctctgagcctcagtttcctcactttcaaagtgaaaatagtaatacctaataaggttgttgcgagattagaacctaataaggttgttgcgagattagaaataatatattaaaggcacctagcataatatctaacacatagtaggtactcagtgtaacataatttaaaatgtatatatactcttaaaaggaaattatgaaaattcagaaaagcacagagaaagcctgtgaaaacattcattgtcccgtctcttagagataattgctgttaaattcagtggattctttttctgtgtgtatctttatgtatctatataatgtactgagttcagattattcatatttttttttcacttaatatgacggcccaaacactctccacatttttagtgtctgtaaaatactgccatattatattttgtaataataactgggccttcagttattaaaagaagatttagaaactgacacttgatccattcaaactctacttttaccaggacaatatgtttacgtgttaggaggataattcatatccctgggtaaacaaatgatgtagtggacaaggtgcaaaaggactcctccctccattccttcttctctctctctttcagcctttcttgcttatttccatggataggagggttattttgatttttaaagtaatgaggcaactaggtgaaatgaagaaatccattggcctggaagttaggaggtcagaaattttccttcttacagtccagtcactgactcactttaaggcagtcttttcattttttggtctaatttttttcatttgtaaacatgggagaagtgggttttattagagagattttcagactgggcttttctgagtgagtgttagagttctgtggagatgttttttcatattaggtagatttcctctcaagggaaaattacatggctaaaaaaaattaagtttcacgtttcaaattttattttattttttagacagggtcatgctctatcacccaggctggagtgcagtggtgtaatcttggctcactgcaacctctgcctcctgggttcaagcagttcttgtgcctcagccttctgggtaggtgggtgctcgccattacactggctaatttttgtatttttagtagagacgggctttcaccatgttggccaggctggtctcgaactcctgacctcaagtgatgtgcccaccttggcctcccaaagtgacgggattacaagccttagccactgtgcccggctcaaatttcaaattttaaatgaaatctcagtggactttttccttttttaaaattgagatataattcacataccataaaattcaccttttcaaagtgtacaactcagtggtttttagtatattcataaggttgtacagtcatcactactatctaattccataacgctttcatggaaaccattaatagtcgctccccttttcctcctccccctagcccctggcaaccactaatctatttgtccctgcggatttgcctattctggacatttcctgtaaatggaattatagtatgtggtctggctgccttcacttagcgtaatggttataaagttgatgcatgttgtaccctaagtacttcatttcttttttccattccttttagttttttttttgttttgttttgagatggagtctcgctctgtcacccagactggagtgcagtggcacaatcttggctcactgcaagctccacctcctgcgttcacaccattctcctgcctcagcctcctgagtagctgggactacaggcgccagccaccacgcctggctaattttttgtatttttagtagaaatggggtttcactgtgttagccaggatggtctcgatctcctgacctcatgatccacccacctcggcctcccaaagttctgggaccacgggcgttagccaccgtgcccagccctgtttaaaatttttattttactcatttatttattttgacacagagtctggcccagtcaccagggctggagtgcagtggcacgaacatggctcactgcaaccttgaccttctgggctcaagctgtccttctgctcagccacccgtgaagctgggaccacaggtgcatgccaccatgcctggctaattttttcatttttttgtagagacaaagtctcacttttgcccaggctcaagtgaactccagggctcaagtgatcctcctgtgttggccctgcaaagtgctgggattacaggcatgagccttcacacctggcaccattccttttttacagcattttagaaaaaatttttttcaagtttggaaaaaaaaagttttgtcaggctgttagaattcccgtagcagtagaatgcattatctgcagtgtttgttgagatgcaaaaacaatttcagtacttcagacttttaaataaaaggctctatttagttcatgtgaaaacttttaaagctctgcccttcccccttaaagctaagagactgatatactgattgccagtcttgttttcctcctctgggtttaggggaggggattagggccagactttcattggataaaggtagttgaggctggggttaggctcttttcagaggaaaaatcaagatattaacctgtcaccagaaggaggagggatggatggtgggtgggttaaaacaacagatgtcaggtgtacataactgggatggactttatctgctgcactattggtgcaaaatcctttcctcttatgtgtctcctggtgttcctaaggaaagtataaggaagtcacctgcagtttgtagggaatgagctatttactcatgcatgaactgtgttctctagttaaaaagggattgaaaagaagaacaatatcagagtccctatccaaattatgaactccttgaggtcagagattgtgtcttgtcacaattatacctccagtgtttgatatggaacctggcatacatgagtcattcagtgaatatttgtgagattacttggttttttgccttgttgacttaagaaaactttttattttgaaataatcatagatttgtccgagagattccaaagaaatgtacaatgatatcctatgcatccttcatcctctagcctccctgaatgttcacatcttataccaccatagtacaatataaaagccaagacattgacatttgcacaatccatagaacttaaggtttcaccagtcacacatgcactagtttatgtgtgtgtgtttatgtttgtagctctatgctatgtactatgtgaatacatgtaaccttaactaatgaccacggtgatcaagatgctcaaatatcaccacacactctcttgcattacccctttatggccacctccatttcccggtccttaacccttggaaatttagtctgttctccatctttataattatgttatttcatgattttttccagaaatgaaaccatgaaggtatccccaagattgccttttttttactcagcataatttccctgagttgcatccaagtcgttggatgtacaacatgcaccaacagtccattcctttttactgctgagtagtattccctaaaatggatatagcataatttgttaaaatatttatccattgaaagacatttgggtggtttccaattcttagctactaggaatagagctgctgtgaacatctgtgtacaagttcctgtgtgaaagtaagtcttcatttctttgggataaatgcccaatagtgcgattgctggattgtatggtaagtccattttcaattttgaaagcactgccaaactattttccagaggggatataccattttaaattccaaccattattgtatgagtgatccagtttctccatatccttgccagcaattggtatagtcactatttttctttttagcatttgtggtgggtgtgtagtgatacattgactttttgccccttctcctaccaaacaaatatgttaagttttgaactcagcttcccaactctcagtggcctggtctgtgatttccataggcctctatacttctgacctcctcctacctccatgaccttgacctgacttctctttcttctctccccagcctgggtcccggggtcccctttttacctcagaatcgctttatctcaatcctgccatcttcccaatgcctggagaaagtcacaaaagtgctctccactgctgccaggcctctgatgttacagctcctgggcagtcctttcctttacctcagtgatgtcaccctcccacttctgacaggctctgctccatacagtgaggtcttctctcagagaggaccttaccacctctcaacaagagtgagactgttcagtctgaagcccctcagcatctcctttctccatctctgcctttctgtttcttgcagaagccaactcctcatgtgtgcttatgttcccagagagcctccagctccccagggtagggatttatcagaggagtctattttcagacttcccttcgtctgttctccttttcctcagagtgtccttaatggaacacccacacctctcctctagtactgagtctgttgaatcaggatctctggaggtttgcagggcggagagtctctgtttttatcagtctcctcaaggcctccagtggggagtcagattcagagacggctgcctcagggaccctctgggcccctcttcttcacactacccctcagtagtgttttccccaaattttggagaaccaaattattttgttctggactcactgttttttgtttttttttttgagacggagtttcactttttttgcccaggctggagtgcaatggtgcgatctcggctcactgcaacctctgcctcccaggttcaagcaattctcctgcctcagcctcccaagtagctggaattacaggcacccaccaccacgcctggctcattttgtattttcagtagagatggggtttcaccacgttggccaggctggtctcgaactcctgacctcaggtgatccgcccacctcagcctcccaaagtgctgagattacaggcatgagccactgcgcctggctgactcactggttttaactctgtggttttccatctggttcctgcatttctgcccagctcctttaaatttatattaataattgtaattatcaggttgctttggttttgtagtcttattggctcctgctttgcagtgtcatcagtttcatctttacaaactctgatgctctaactttcttgcataaacagcagcaattgctcttctttccttgcacagaggtaggagtgttctcaatatgaccaccatctggtttcccagcctaggttttcacaaatctcctatacatgatttatgtggcccctgaaatgcctggcgtacaattgctcagaccatgttctttttggattttgttattgggcctcatcttattgcccctgccttagaagtacaactcccaattcagtctttggtcaactgaaatttattctttgtcaaagaccctttcccacagtttattccctgcaacgttttatgaattgttgcctgaactagatgttcggttctaacaatatatattacacatgatgccaagcactgttctgagtcatggtcatataaggtgattgggaaatgatcctcacccccccaccagtgttcccaaccatttttcccttctctagtctcccatagctttctctccccgcactatgattgttttttcattttcagctgtattttaggttttttgttttgttttgttttttgagaaagagtctcattccgtcacccaggctggagtgcagtgctgtgatctctgttcactgtagcctctggctcctggattcaagtgattctcgtgcctcagcctcccgtgtagctgcagttacaggcaggtaccaccacaccggctaatttttgtatttttgatagagatggggtttcatcatgttggtaggctggtcttcaactcctggcctcgagtgatctgcccgcctcggccttccaaagtgctgggattaaaggcatgagccaccatgccccactttattttaggtttttgagaggagataatttgtcaaacccagcactctgcctaccacaaaagttgatgtgcaggatatatttacggaataatttaacatatccctctacctccctgccccagcaacttggaaggtcaatgaacatgtgctgaattaaccccactcttgctgtgtgtgtattcttctctcatacaaccaaaacctaacttttgttaattagggttcagcattagccatttgaatagcagaattctaagttatgtagaacagtagttatccttttttttttctttttgagatagggttttgctctgtcacccaggctgaaatgcagtggtgtgatcatggctcactgcgacctcaaccactgtggcacaatccatcctcccacctcagcctcccgagtagctgggactacaggtatgcactaccacacctggttaatttttaaattttttgtggagacagggtctcactttgttgcccaggttggtcttgaactcctgggctcaagcagtcctcctgcttcagcctcctaaagtgttggaactacaggtatgagtcactgtgcctggccagttatcctttttgtttgtttgttttctgttcacctacagatcactttttagggttgaaaagcccatgtgcagaagactacaacagaaaagatggtaggagtgtgttggttttggagtaactctagtgaggtgatgaatgtaaatttaaaatcttaagtatacgaaacaggttactaatacatttgagaaacaataaaggtgctgcttatttatcttttaccatgtgctagaattgtgctaagtgcttagcatatattagctcatttaaacctagtactaatcctgagaggtatgttcattatattgatgaaggccttgaggatcagaattgtgaaataacctgctaaaatcagagagctaatagatagtgtagccaggattcccatataggtttctttgatcccacaacccatgttttctatgctgttttgcctctctagataaaagcagaaactctcacattgtaaagttaatgcttacctaaaatgtatattttgaaagttattaaacttttactgacccatatgaaaatgcctaagtcagtgagtgagtgaaggaatgaatgagtgagagaaagagtgaatgaaagaatagggtagattggaagtaccatatgtactagtctgtcagatatcctaatacactgaaaatcagatatttgtggtggtatatttgtgggaaaattatcttaaaaggattaaaagtccattaaaaatgcaaacaaatgaagtagtggtaatgtaaaaacattgaggggataatgagcttatatacaagatttttaaaaatggatacttaaaagttcatcagtcagtagagtaataagatgctgttgtagttcattttggcctcacttccttatctccttctttaaaagtccttcctcagtacctcttgagtagtggttatttattcctattacaatgtatttcctttcatttattttatctttttagactttggagactaggtccattttattaagcttcaagagattgaatgaagaacagtcactcccccatttacctacctccatttactttgccatttaatctcttttatttatttttttgaggcatggtcttagcctgttgcccagaatggagtacagtggcgcacaatcagggctcactgcagccgtgacctcctgggctccagtgatcctcctgcctcatcctcccaagtaggtgggaccacaggtgcatgctaccatacctggctgatttttgtattttttgtagagacagagtttcaccatgttgcccaggctggtcttgaactcctgggctccaacagtctgcttgccttggcctcctaaagtgtcgggataacaggcatgagccactgtgcctggactaatttcttttaaaagggtgccattacatcccatgaagtgctgggaagaacactgggggtcttagcactgagaatgtaaatgcttatttgaattctgttttcagtgtaatactcagccttgtactctgcctggtgttcccctgtccattgaacctcttgttgccctctccagagaataaatctctagtcttctgttggggttggggaatggcaactgcccatctgcattgtctgaggaaggggatctgggggtctgtcttagtattgccttcacctgtctacattgccatcaaatcctgagtccttaggggattccacactgtaactcagcttgccaggttaggatttagcttaattcattctgtttttattttctaaaatttgttgctgttttctctgaattcataagaaagttttaaaaggtttgaaagaaaagcaatacagagaagcttaactctaacatgaaaaatttataactaatggcaacattgggaaaaagcaagattggcagcatatgaaagtaagaacattgcacaaatgggcatatttagtcagaattcttaggagatgaactgctaaacatcggtttcagaatcctacataatgatttgtgagtgtgtgtatgcccaaagaacattgaatttgtaggcgaaattttaagtacacagaaaagtgtaaagcatttataaagtgaatacactgtgtaactagcatccaaatcaagtaacaggaggttactagcaacccagaagcccctttctagttcctgacaaccctccaacctctactaagaataactaatgacccaatgttttacactgtagattctttttgttcatttttgaattttgtataaatggaatcatttagtatatgatcttttgctctcatttattttgcccaaatttatgtttgtgagacccattgtgtggtagttgtagttcattctttctcattcctatatagtattccattaagggaatatactaatttagttttttcattttggcagacatttccagtttgggtctgctatgaaaagtactactatgaatattcccatatgtgtcttttggtgcccatgtgaacatatttctgttggttatatacatatttctgttggttatatatgttaaaaattactgggtcacatggtatgtgcatattgagctttaatagatactgccaaacagttttacaaagtggttgtaccaagttttactcctctcagcagggtgtgagatttctagttattccacatctttaccaacatttgatactgtcagtcatttaaatttttttttttccccaagatggagtctcgctctgttacctaggctggagtgcagtggcacgatctcggctcactgcaacctccactttccaggttcaagcgattctcctgcctcagcctcctgagtagctgggactacaggcgcgtgccaccaagcctggttaatcttttgtatttttagtagagacggggttttgccgtgttggccaagctggtcttgatctcctgacttctgatccacccgccttggccacccaaaatgctgagattacagatgtgagccactgcaccaggccagtcatttaaattttagccattctagttagtgtatctgtcactgtggtttgcatttgaattttcatgatgactgtgaggttaagcacctagtcataagtttattgggtatttgtatgtagtcttttgtgagaggcctgattatgaccagcacttttatctagactttcccagccaccagaaccataagatacaaatatgtattgtttaagctatctggtctatgctattttgttacagcagcctgagcttactaaggcagaggggaagtgctattgtaccagtaccaaacataggcctaagagcactgtgtcattgttgtttttttttttttttgagacagagtttcattatgttgcccaggctgagatgcagtggcatgatctgggctcactctaacctccacctttcgggttcaagcaaatctcctgcctcaggctcctgagtagctgggattataggcgcccactgccacacccagctaatttttgtagttttagtaaagatggggtttcaccatgttggctaggctggtcttgaactcctgacctcaagtgatccacccgcctcggcctcccaaagtgctgggattactggtatgagccactgcctctgtctgagcattgtatgttaaaacaacacacgtatatatcttacagttctggtagctggaaaagtcaagataaaggtgccagcagattgccaaattttcagctgcgttttctgccttttttgtactgatttgtagattttcttatagatttatattgagtcctttgaatgtatgtattgcaaaaatcttctgtcaatgtggtttatattttcactttcttaatggtgtctttggatgaaccgaaattctttaatgcagtctactttattgatttgcttcacagttcctactttttgagtactgtttaagaattctgtttgcgtcaatatcgtgatattactttatgtaggttttcttctgaaagctttgttttagagtatattgatttttaaaaaatttaaatgcatttgttcacatatcagcctgatctattgaaaaacacttaaacacttaaataagcttaaataataacttttccacaaactatctatgtgatcttcggcaaggcagttagcattttttgttgttgttgtttatttttaaattattacctttcctatggtgctgaagggcagttagcatttgaacttaatttctttaactatagtatgataataataatatccatcttagagtattgttgtaagcatcatgactatctaaatgttagctattattaaaaagtcagctattagcaaagacattttcagagacaattggagatacttagatatagattggatgttagatgacagtaaggaattattaattttgtgttgtgtaggaaaatgtccccattaggaaatgcatcatgaaaaattaagaggtgaagtaaaatgtctcaattcattctttaaaagttcagcaaaaacaataaaatcccaaatatctagataaagcaaacttgcaaaatgtttcaaattattgaattttttgtttgtttgtttgaaatggagtcttactttgtcacccaggctggagtgcagggcactatcttggctcactgcaacgaccgcctcctgggttcaagtgattctcttgcttcagcctcatgagtagctggaattacaggcatacaccaccacacctggctaatttttgtatttttattagagacggggtttcactatgttgaccaggctggtctcgaactcctgaactcaagtgatccacccaccttggcctcccaaactgctgggattacagatgtgaaccaccatgcctagccaaattattgaatttatacattagatatgtagatattcatcatgtgaaattctttcagcttttttggtatgtttgaaattttcataataaaatattcaaggaaagttagtaatgaatctatagcattcctattatttaacattttctccaaagctaaaggtgcagaaggacctaattaaatggatttgagtcacttagcctgttctgcctgggaaaggagattaaaatgaatttaaaataaaatgtgaactatatccctgcatacttgagtgggataaagctgagccataaaaatccaggttttactgggtgtagaaaaaaggagaaggtgaggaaggggtatgagatgtactgagtgctgttaagggtcagatactctgctgggtgctgtaaatatcacctatcattcataaagcaattctacgaggtaagcaatattagaaaagtttgatatgaaaagtttgatagaaaagctttggataacttgactaacacaactagtggatagtggagtgaggatttgtacccagatctgtgtttttgcacacagatctgtttttgcttttcttctttcgttcctactttcctctctccctcccaccgttgtcacttttttcccaccttcactccctttccttcgttcttcctttctttctgacttctttacaaatgtttttattttttatttactttttactttttgagatggagtttcgctcttgttgcccaggctggagtacaatggcgcaatctcaacgcactacaacctctgcctcccaggttcaaggaattcttctgcctcagcctcccgagtagctgggattacaggtgcctgccaccacacctggctaattatttgtgtttttagtagagacggggtttcaccatgttggccaggctggtcttgaactcttgacctcagatgatctacccaccttggcctcccaaagtgctgggattacaggcatgagccaccgcacccggcctggttttttttttttgttttttttttttaatgaatattacgcttttcattgtagaaactctggaaaacacgtttgtattaatttaggttttgctacataataaaccaccccaaacttttttcttttttcctgagacagggtcttggtgtattgcctaggctggggtgcagtggcatgaatgtggctcattacagcttcgacttcctgggctcaagcaatcctcctgcctcagtttcctgagtggctgggaccacaggcacacaccatcatgcctggctattttctttaatttttttttgtagagatggggtctcatcatgttgcctaggctggtctcaaactcctgggctcaagtgatcctcctgccttggcttcccaaagtactgggaatataggtgtgagccattagacccagccagtttttttattttttatttttattattttacactgtgttgagataaccacccccaaaattagtggcttaagacagcatacattcaggtcacaattctgctggcagtaatttaaatgggctcagagggcagttcttccagtctgggccaacctcagctgttgtcattggggctcactcaaacgtatgaggcatcagctgggatgtcaggatcagctcctccatgtggcctcccatcctacagcagactagcttgggcttgttctcttggagaaggagaagaggagccaagagagcaagcagaaatccacaatgctcttgggcctgtgtctggagctggtaaaacagtacttcccctctgcctcagtcagctcaggctgctgtcacagaacatcatagactggatagcataaacaacacacacttatatctcaccattctggtggctgggaaagtcaagataaaggtgctggcagattcagttgctatgaggacccttatcctggcttgcagaaggctgcttgctgtcttctcattgagtcctcacatgggggtagatggggtgtgtgtgagagagagccagagagacagtgagcacatgctctggtgtttcttcttttccttataaggacactaatcccatgatgggggccctacccacataacctcatttaaacgtaatcatcttccaaaggcccccatctccaaatactaccacactgggagttaggccttcaacataggaattttggagggacacagacactccccaacaccctctattgtacaaagcaagtcacaaggccagcccagattcaaggagtgaagaagtgtaccctacctcttggtgagaagaaatataaaataatattgcattgtgatatgggtggcagcaagtgagggtgagtgggatgaatgtttgcagccatttttgcaaacattttttcataacatacaaaaataaacatctactttaagtcatttctaataccattatcaagagctaattattgttaatatgttggtctatgcacaaataggggcagatatgcacgtacagaggcatagttttgtctgtacacatacagaggcagattgcttttaagaatataattttcatttagaatcaaacttatgttctattagtgtattttcccaggtattaaattttccttgaaaacatgtttaccctatgatgcaaaggaaatcaacataaattactatgttccaggcattgtgctaagcactttcactcagttatcttaactaaaaaacaagtttcttgttaatttgcagggttaatttgcatcaaaacaaggaattcatttgttgctacaaagaaaaagcaatgaaaggactttgtgaaaaggttcagagaaaatgataatggttaagacatatcagcaatacccatttttctcttgaaacctgacttgtgaactataacagaaaatacagaagataaatccttgtacctattgcccaccaatccagtctttccattttataggtgaagtcatgtcattatttatgtatttgtttgatttggctgtatttcaggatcatgttgaacatcagttcttattgtatgggtaacataaataagaagcagaaaatgtagagggcaaaggccaaagtttgatcctgggcttgggactgattagttgttgactatgaaaaaaaaatcacttaatttttttgagttcaattttatcatctgtaattacaaaagcttcaatcttcttaaaattggtgtgaagattgactacagcattttatatctgcactgtctgatgtagtagccactggctataagtggctattgagcatttgaaatgtggctagtccaattgagatgtgctgtaagtataaaatacacagtagattttgaacacttaggtggaaaaatatataaaatatcttattgattacatgttgaaatggcaatatattgtacccattgagttaaataaagtgttattaaaattaattcacttgtttattttttaaattcacttgtaaaaatttattttggctgctggaaattaaaatattacacatatggctcacattatatttctgctggacaatgttttgcttaaaaaatgttctctgtacaatatagagtacagcataaatgttagttatagccagaaaaaaagtataggaggtttagttgaatatgtaaggattctaagtggtagcatgatgcttattatttttgctacatttataatgtaagcttttatttaggcatctgaagtttttctttttatgtgttatagagaagtagggatggaagtgctaatccaattatgtgaggaaatcataataacttcagtgtattgagctacagtgatgcaggcattgtgttaagtactgtattaggcaggattcctttgattacaagtgacagagatgcaatctgaattaactaaattgaaaaagggggatcttgtaattgtatgaagcatgggagtgcatctgggtctcctgaatttctagaatataaacactgtttttcctatatacctatcttcctctctcaaatttacttctccctcctcagcagcattgttctctcagatcacttgtctccatatgtcagaaagaatggctccttcaacctctgtgtgtcatctttgctctagggaaggatagactcagacttgctctttctggttttaaatggaaaagtcctgtgaaaaagccatggttgacctagcttggttataggtacctatccctgggctatggcagctctaacccaaccacagaagagaatttcccagaaaaagggaccattcttcttggttgataaaagaataaatgtacactatagctactctagctaatttaatatgtacagccaatcagtagggtagtacctcaatgaacaaatgagaaactgagactcagaaaagttatgtatttcattcaagttcaaatatccaggctggaagtctgggtctgtccatctccaaagcccatgttcttaactaccacactgagaaagttctagtaaatggggtttgtgtcgacttaagttttactgaattatttaataggtctttgctatttttttcctcctatcattgcttcccattgaaagttaagatagattgaggacaagggaactggccccatggtaatactcagtaaatccttatggaattgaaaaccaacaccactatgctctccaatcttgtgaccaaggctataaaggcgttagaaaagcactgctatcattatctttgtaccatgagcttaagacatagttaccactacttggacatttcctttttgtaatttgcagtcttctgccttcttttgaaaacttcttatttttcaccaacacatggttccctatagtctataccacatgggcatagagatttcagaggcaaagatgaaagagtcatactctgttattcataaataaaatatagccaaagggaattttaaaaaatgatgatctgtaagtctttcagaaaaatggtctggagtttgtcagtctcctactcggatcaaaaataaagtcaaagttttcaactaaaataattgcaataggctacaaatctgtttgtctactttaatacagtagaaatggaaagtagaagtaagtgacaactttattggctgaattcatattaagcagtgtgatggaatgctgagaactctgacccggactggtcagaaaaccagtctcctatatgtagctctgtgaccttaatcagtaataagtacaaaggctaactaaccttcattgggtgctaaacagcgtagaacatcttttcataggttgttgactgactctgcccagtggcagtagttattcattcattcgacacatcttttttttttttttttttttgagacggagtctagctctgtcactcaggctggagtgcagtggcgcgatcttagctcactgcaacatccaccttctgggttcaagcaattctctgcctcagcctcctgagtagctgggattaaaggcgcacgccaccacgcctggctaattatttgtatttttattagagacggggtttcaccatgttggccaggctggtcttgaactcctgacctcgtgatccacctgcctcggcctccaaaagtgctgggattacaggagtgagccaccacgcccagcctcattcagcacatctttatcaggcatctaccctgtgtcaggcatggagttaggtaccaaatatggttctgccatcatggagcttacagtctggtgtgggaagtcatacatgtaaacaggcaatttcagtgtagcatgttgtaagtgctatgttagaagaagtagactgttctatgggacctcataaaatgatatcaaacgtggttttgagaaattggatggtttcctgggacatgctgtccatttagggatctgaagggcaggctgggattggccaggtgggggatcacaacaaagctctttgtctggacttagaaagaggttgggaagggggaagtggtgaaggctgagggctgagtcttgagggaaattagctggtcctagaatgcagagtccattatgctgactacctttgactgagggtgataggaaacccttgaatagttttaagcaactgagtcacataattagatctgcattttagaaagctgagatgtgaatcaattttttcatttttctgtcttgattttcttatctttaaattgaaagggatagtctaccctttataactctgtccagctttagtagtccatacatttctcctattttggcaaaacttaatgaaactgcctttgcaaaaattataacagtgagaaaattatgacagtgacagatctgacttaatgactccattttgctattctaaccttcaagctgcccttgttcattgttgggcgcaggctgaactaagtttgggaggaacttagtttaaccttgaaacaaagatgataacagcccttcttgcctgaaaccagactgcccatgtaggactaataaattagctgcaagattggaaatgtaggtttaggagtcctgtagccggaggctgcaagttctgaacctcccccattgctccttggggtaacatcattattgtgaaacctaagattggtctgagatgtttttcagaccttgcattctgaggcaccagctggcgccacccagactggtaatctggcacaaccagttctgcagtgcctcccaggaacagaagacagcaagaagaacccactttaaccccctatgattccatctgtgacccaatcaatcagcactccccactccctggctccccctacgtgccaaatcatcctttaaaaaaaaccctagtgtctgaattttccagggagactgaatcgagtaataaaactctgatctcccattcagttggctctgtgtgaattacactctttctctattacaattcccctgtcttgataaattggctcttatctgggcagtgggcaaggtgaactagttggatgattacgttacttccatgctgattttgagatctgttgggcagcaaggcctaagattacaactagtacttgaaaatgaggcaagttttgtgggtctagggtgggtgaaggtgggaggtgaggtgaggacaagaagctgaatgaatgatgtgttgtttttactgggaaaaaaggaaatgggaaggtatgcagtttcctttgacagtctcctgaagagaaactggttaggaaatagctttggcctctcagcaagcaggtggaatggtactttgccacaattctagtacagatgaaatctgatagttacttcccccaaattatgaagtctggaatttgcttaacggtagtagttaggggtctatacatatgaaaaaagactgaccatgactttttttttttaaccgttcaaagtgtttgttaattatttattaagataaacaatttcttagcccacatattcatgtttcacagatagttcaggaacacaggtacagtgacaaacttctatgtaattcaacccaaagaaatactttatgttccaaaatcactttgtactctgagagatattagccttcctcatctcaaattctttaattcaattataatttctgtagaaatctgcatatgccttctttcttggtcaggccacagcaaacttacagagagctgcaaccccagggttataaggaatgctccaacaatatgaaatgacagatgcttggccagaaggccacacatcccaggttacaccaaggcactgagagccatggtagttattgtccttgacagggatgtcagcatcaacactaatgtctttcccggatgatggagaaatggaccaacttgataagtattgatgctgagtgatacatacaaagaagtccattatatgattttccctacttttgaatatgtttgaaaatttccctaatagaaagtaaaaagatagaataataaaataaaaatacccccacttattacctaagttttcttttagcacaaatggaaaataagtcagactctctcatttggccatattgaagctaatagtctcagaaccactgtgtcataacactgacattttgcttaaagctctgtatcacctttaatggcttaaaatattctagactgtattgagatcatgcaagtagatcaaagaaagagaattacacgcaaaggaagggatagctgtactagggagttcactggtaacagagtcaggggtccacagctctgggctgggtctgtcctgaaaggcagtctctggatagcaggatgagatggagtgatcactggctttggagtcagacacaatagactgagctatgttgaaggacaatgacaaataacacaatagatagcattcattgaaccctcactatatgccaggccttatgctaagctctttatgtactttatgttatgcaattttaataactaccctgtttttattagtattttatggatgagaaaacacaggtttagaggttatcaaatttgtccatgaccacatgaacttgtaattcccagtaaatatttttgtaaataaatatctgaaagtgtccaggcacggtggctcatgcctgcaatcccagcactttgggaggccgaggtaggcggatcacctgaggtcaagagtttgagaccagcctggccaacatgctgaaaccccgtctctactaaaaacacaaaagaattagctgggcatggtggtgtgtgcttgtaatcccagccacttgggaggctgaggcaggagaattgcttgaacccgggaggtgagtcaagattgcgccactgcactccagcctgggcaacaagagtgtgaaaactccatctcaaaaaaaaaaaaaaaaaaaagaaaaaaagtctgaaatccagtggttaatggtggtaggttgtaccccagttagtttggatgcacataacagaaaaaagcaaaataacagtggcaaaataataactaagtagtttgtttttctctcacctctaagtaatctagaggtaatcagtctagggttgctagggctctctggagctcggggttcttctattttactgtttcattgtgaatgtcttccaccctcaaggttaactcatggtccaagtacctgctggagctccatattccaactagaagaaagggagaaggattggaaggacataccacctaccctcctttttaaggatccataccagaaattgcacatattatttttgcttataattacaatggctacaacttagtcctatgtatgcatctagtagattacagaaaacttgcatgtggcaggtccaagacatgaaagagactgaaaaatatttatactatgtggccacatgcccagctaaagggcacagaagcatagaagatggagagcaacattgaggatcactagcaatcactgcttagcccacactcagctgcattccagagttttatctctttgggtatggtaatccttctcacgaaacctttcacattcgaatggataaatacatgaaaaacccatgcacttagtttagtgttcagaaaatgctagttccttccctttaattagatgttgtcaagtgagcagcagtgatttggtgctctggagactcagcaccctaagaatttgttccacctgtgtctggggtggtgactgccttctgcatcaccatcttagaggatttgccccaagttctacatcctctatggcccagcaccctgttaggtacaatggggttgcaaaatgaagcatccagattttaaggatcttgaacataaaatcacacataatgggctcagggccaaacatgggactatccaggatttaggaaaactttcacttcagtgttggtttgcagctgactttgggaaactatttaccacataaaaatttccagtgttttcttcaagactgagagaagtcgatcacagaaccagcccacttgagaagctgaagttttcctacttgtaaaatgacagatgaaaaggactgatgcttccatgagttgctcttgaaatggtaatgtaggtgtatctgtgtgtggaaaaacacactcaaagtgccttttcttattttctcacaacaaaaatcaacacaaattaaaggcttctgtgatcaaatgggcacttccccccccacaaacaaacaatcaattctgcagtggacaccagctgcgtgtcctccaattctgaaactatctaccaggagataagtgtcagataccactgacacagtccccaaaactgctcccccaacctaccacctccactttcagacaccagttgcaagtctgggcctctaaaacttctgatcgaccagattcaagtttgggttcccatgatcccctctttgggttgattaatttgctggagcggctcacagaactcagggaaacacgtttattgggttataataaaggatattacaaagatacaaggaaagggatgccaagctgccatgccctctctgggtgcaccatcctccaggaacctccacttagctatctggaaggtccccaaaccctgtcctcttgggccttgtatgaagacttcattgggtaggcatgattgaagcatggacaactgtgttaaaatgtgattcatggacaaaaagtatatgatctaaacccaataaggcctgtttagactctgtttgtcttctctgtgcagcatttcttcccccagggatggggcaggacaccctctgggatgagggtcttatgacccacaatcagataagagtcctgccttggacaggtgaaagtagggaggtagaacatcagagagagagagagagagagggagagaaagagaaagaggttttgtttactatgtcgagggctatgggagttatacaggaactgtggattttatatataatacgtattatatatattatatatataatacgtattatatatataatatatataatacgtattatatatatttattatatattatattatacatttatatattatgttaatatatacattaatatattatatcaatataatatactattatattgatatattaatatataatatatataatatatatgttacagtataacattgctgtggtttgaatatcccctccacaactcatgttgaaatttaattgccattctgacagtaataggtggtaccattaacaggtgattaggccataaggggtccaccctcatgaatggattaatgccattactatgggagtgcactcttgattaaagggagtttgcctcccccttaacccccttgctgtctcttcctttctttttttttttttttttttttttgagacggagtctcgctctgtcgcccaggccggactgcggactgcagtggcgcaatctcggctcactgcaagctccgcttcccgggttcacgccattctcctgcctcagcctcccgagtagctgggactacaggcgcccgccaccgcgcccggctaattttttgtatttttagtagagacggggtttcaccttgttagccaggatggtctcgatctcctgacctcatgatccacccgcctcggcctcccaaagtgctgggattacaggcgtgagccaccgcgcccggcctgtctcttcctttcttatcctctcttgccttcctgccttctatcatgggatgatgcagcacgaaggccctcaccagatgtaggctccttgatcttggactttctggccccagaaactgtaagaaataaatctctgctctttgtgaattacccagtctcctgtattctattatagcagcacaaaatgaactaaggcaaacgttgttatactatgagcatgtccttgaaaagtcaaggataagttaaatgttagcaaatggaaatgtgttttttaagtgagctcattaaagaaaccagagcgattttttctgtaaactaaagatggcttccaaaataaagttttttggtattttcattcaattagcagatacttactgaacacctattacttggcaggcactgtgctagacctcataaaacatgatgggtgttgtcttcacctgccagagttgctcaaaatacgtgaataataaattgacaaatatattctcagactaatatacggtcaaataataacatttgttacatcggttataaaagttttttaacatattaacatttaagaaatcttggggtatcttaagattgatagtatgtcatactttctttagtagcatatttttcttatgttgtgacttaaaatggatggtttcttagatttgataacatgcagtatttagggctttagtgtttattatgtgcttccatgcgcctcatttgattctttcttctttttttttttgagacggagtctccctctgtcacccaggctggagtgcagtggcatgatctcggctcactgcaacctctgcctcccaggttcaagtgattctcttgcctcagcctcctgagtagctggagctacaggcacgtggcaccatgcccagctaattttttgtttgtttgtttgtttgttttttagtagagacggggtttcaccatgttggccaggctggtctcgaactcccgacctcaggtgatctgcctgcctcagcctcccaaagtgcaatttccataagttgcccaaaccattttccactgaccacacttagtaaggcaggtcagatctaaggaatgacctaaatgtccttcagctttcactttgatcagtggaattgcctctttaggctgcctcagtggccaaagcatgatcagaaagatggaggtttgaatcctaactgattgttgtgtaaccctgggccagttacttaacctctccaagtctgcctcaaaataagaataaaatctttagatttaaggtaggtaaggcacctggcaaatgataaataatcaatggcagttattttgttactattagagcatcaaggaaacacaggtttcatgatattgggttatcttaaagaaaaaaaaaaagccctacctgggaaatttgtcctattttctggaagacccagaaccccatcaaacaccaagaacagatatccccactcctaagaaacattataggaatagttcagattttcttctgttaaatgtcatccatcagctcacccgattttttccagcagacctcctcttctatcttgtgtgttgctttatatgtcgctcttgacagctgctactatttatgcatgcatttctatagcaaaaccttgattaactgggacacagcaaactgtagcacttaaatgactatggttttcccctatggacatcatttggaggagagagggaagtgacaactaaagttttgagaactgaagagaatcatgtaattccacatcttcgattttactgctgagagaaggagaatggatcaaggccaccctgctgattaagagcagagtcaggagaggattctcggtctattttgctttcttctggactgtggcctaaagatgtgtcttttggcatctctcttgggggtatttctccttaaggttttgccactacactgcaggtctcaaactcaaatgcctgcaagggctaactggtaataggaatgagtggaggaggctgagtattctacattgggaagtagtagtgaactatggtcctcagactggagcctatataccctctgtaaaggcatctaaactaaaatgtttttcattttaagaagtacaggaccgacaaaacacatctgggagtcagagatggcttgatgttccccagttgaagtgccttgcactatgtatatctataggccttattcaataaggagataatctggattatggccctcaggcacattgccaaagtaagtttcaatactgtgcattgatttatgtttgttaaaacagaaaattgaagagacgcattttagaaacctgatcataatatattttgtaacagagagaacagagtagaagctctggcttcatttactgtctgcttagccaaaactctttgtggtccaattagccaaatgaattcagatgtcacagtgtataggacattcataattgggaacactaggacctcttagtaccagagattgtcccataacatagacattcaaaaacatttataatcaggacacacagtgagaaatacatttatatcattactgagcagaaacatacacacactcatacatatcacacaaacccaaaacaatattttaagaaacaatatcttactgcgttccaaactctgatgttttccaacctatttcatttttatgaaaatactttataatttactcatcggctacagcatatagtttaaatcactggactaggtaatgccatgacatttttgtttattcattaattcagtagatatttactcaatatctaatgagagcgaggtgctctttggagtgtcatgggggacacaaacatgaacaaaacatggatttttgccctcaaagagtccaaatccaataggaaatacatacacgtgaatatttaaaaactcagggcaaaacaatcagttcacatttgacaaactgcttttatgttatcatatgtcataatgataacaaatctcttaggtaagctgggcagatttaaacttaattttacagatgggaagttgcatttttgaaaaagtgacattttaaaaagaagtggaatgatagtaataatagcatatgttaagcacttattatatgttaggaactaatttacttcttactataaccttattatgatggcattactataatcctcactttacagaggagaaaaatgaggcagagaggttaagtaacttgcccaaagtcatagagccaggagtcattggaactaagaatcaatcataggcaacttcaatttttttttttttttttttgagacagagtctcgctttgttggctcactgcaagctccacctcctgggttcaagcgattctcctgcctcagcctcctgagtagctgggactacaggtgcctgccaccacgcctggttatttttttggatttttagtagatacagggtttcaccgtgttagccaggatggtctcaatctcctgacctcgtgatccgcccacctcagcctcccaaagtgccaggaccacaggtgtgagccaccacacctggctggcaacttcaattttaatcaatgtattatattctctggaaatgaaaatcacagatcaaaatcctacataggtcatggcatacataccttgatctcttagcccaccccaaaagtgatgtggcatctgctgtgacaggatagcatttggaatgaggtgtgtatgaaggggatggggtggaatagagcctggttcctcagtattcctcagtgtcactaatcttcatcaagttaataaagcacctgaaggcagcaagagaaaagacaaagggaatgattgctgtccccagaagagggcatcttatcctttgccgttgtctcatgtatgatgtagtatttttgagataagttatgaagtagtcttgagtttggaaaaccaagagttaggctgtaaatgttcaccttgtgtttgaccagtgccacctcccttaagcccaaattctcattcaaagttacaaagacaattttccattaggatatccctggaaaaaataatatttagcctttattgagcttttcccatttgaaaaactaagactgccaggcgctgagcttaaagctgcacccaagacagaccaataatggtaatagagaacaattgttaagtactactctctctctcaatctgtttctctctctctctctctctctctctctctctatatatatatatatatgttaggtactaatctaattcttctatataatgatggtactcatattatgcttgttttatagagtagaacagtgagatattcattgataagtatatgaatttgatctttagcacagtaaagaaaattttaatgttgaaattggtgcatatccaaatttaggcccaagccctagtttttaggctgttgtaaattaacctagttattgtattttcctgccttaatatgcttcttatatcttcaattttataggattattaatagttatcctgattgactttatttatattaagtataaagataaaattcttatagcccattcagatttttctttacacttgcaaactccagagatagatattgaaaaatacaaaggcatatgtctcatctataatttctttcagcaatatgtctgcaagttgagcaaaaataactgaaagtgctctttttgaaaataataattttcacttttcaaaaatgatcctgtatttatttatttattttttgagacagggtctcagtctgtcactgaggctggttctaaattctattaatccaatgattatagtccagcatttgtcagggcacatgatgaacactaggtatttactgtccctgtgtgtctgtaatgaattaaaagaaaaagtacagagaaagattatttaagatgttatgggaaaagatttactagacttcacagaattattactttagtcaagtaactaaaataattcaatctgacagatttggaaaattgaaagtataaaaatttgttttaaaatttttattgcagtttttcctgccaccattcagattgtttgatcttgttataaatgagcattaactctgatttgcaattcaggtcacaccatacctcatcaaagaatgcagttgggaaagcaactggccaggaagtttaggtttccccagaaggactggaaggatttagaaaacatttctttggacttcttctggttgatgctcttcctacaagaatctgtgtttgggtgatccttgtacaggaaaatgtctcttagtccaatttattttatgtagaactgtgtagagctagagcttcccggaaactttctgagacccaaatcatctggactgaagtctcttagatgctattgtttgattttgtgtccttaggtgattgatataaggacagcaagagaaaaccatgtaagatgagaagaaagcaaagctggctttgtgtatgggctcaagtacattttacatgcacgtacttttttcctgttttggtgaggaaactctgtcaaatgactcttgacgggcgcctcacttagtccctccaagttttagtagagaaaatgataatttttaaccaagacttacttgatcttgacctaagatgatgagaatgagcaatccttctgaaatcttattattttaggtgaaaataaacattcgataattacattttaagacttaccagagtttatccaggttttgttcagatccagaacttatacaatgtcggagtcttcttttaagaatacacgatgacagatacaaaattaggtacacagcttaattaacttcatgataaattctcttctgattatgagttactgctttctttggccagaattgtgaaagaaaaataaggcgtgaggctagaggatggggaaaaaaaatccttgtctatcttgcttcccaagcaggccttcaagctagctaactgaaacagtcttttctccaggtcctaaggtaaatggtggcggatctgaaaatgcgtcggacttaaccttgcccttctccccagtttattcgctcaacaaagagttctaaacagtcacatctgctctctaggcagaacggacgctgcctcctagtattagaatacccaactctttgatatctcccttagggatcatctgattctggagaatgtgcaaaatattgctcttcctttatatcctagcatagatatattctggcacttaacatgcattctttttctgttgaattgagttacaagtcagttctctaggacggttaccgtcctggtggctttggcggaatcttccggtgaaaataggctaagttgcatgaaatgggtgtgtctggattttaccacaagacccctggtcctcaaagcttcgcaggccgagatacctcgcccctttcttctctgtcacacgcgtgcgaacacaccctcccaacccacgtcgtagtagtcccctcccccgaccaccccgccccgtttcccttcaacccccctcctcacgaacctcccctcccttcctacctccctttccttccctccccgcgggccagcggctttggcgctgccctgctgcgcggcggggcgacgcggcgacacctataggattgcttccgggcactcctcagccaggaggtgctggcctggggcccggagctcggcagggccgggcggctccgcggcgttggcccagaggacgcgcgcccccgtgccgcccgcgtctccttccctccctccctcctcccggcgccccgagccgagctcagcccagggcggcggcttcgcctcgcccggcgaagcttctctccggtggccgctccttcttttccctcctctttgcgtcatgtcgggcacttaatttttttttttttttaattccttcttcagccctttccaccttccatctcccttttcgcttcccaggttgattattttctcttttctccgggcttgcccatgagcctcctcgggagctaccggaaaaagaccagcaacgatggttatgaatctttgcagctggtggacagtaacggggacttaagtgcgggaagcggcggggttggcggcaagcagagagtgaacgccggggcagcggcgcggagtcccgcccgacagcctccggaccgcgccagcaccatggacagctcaggtagcgctgcccgaggggagtgcagcgctgagccccgcgcggcctccggagcctcccagtcgcccgggcccgaggcccccccgtggtcccccagccccggtttgcgagagagccgggctggaggcgaaggcttctaataccacctgggtgtcgagtctctaatttctctcatccagggagctacgaaacgttagatcagtcctgaggcccagagactgtagcgagctcctcctaatctctctagactgctgaatacggcagctgggggcggggagggggagggaaagggaggannnnnnnnnnnnnnnnnnnnggggagggaaggaggaggggaggggtggagaagagaggggagcgggtggggcgaagaacggcttgggaggagggctgggagaggcagctgctttcactgcccagctggatgagggggagaggtgaaggagcatgtgcgttgattgtttttgcagcatgcagacggtatttattccaattgttattcttgcaatgctgatgctatttgcaattctgtaaagctctgccacatcttaactcagccgtctgctagggttaatgttacctttctcctgcagtttttaacctgggatctagagctcttttacacagcttttactgtttgcacaatgaaatttatttcatgtgttggctttgatcttgtttgtccttttgcttgagtgtacagatttcataaacctttacatgtagggacaaggaaattcctctaaactttgtatcggggcttgcaactgtcttttataaaaggtttggcaagttagagtcctctcttggaactgctgttggcatttgcgatttcaatagcaaaacagtcatttaatatatccatgttggactaggagtattattatagctatttgcttacttctgcagggaaccaggttcggagaattgtttacagagatatttataattgaagtcctcagtggttcgttctacactggtaactttaatactggacaactgaggattccagaggaaagattcatatggggtcgtttgaacagtaatgaaatcaaactgaatttaaatgccctgctttgcaaacaaatgcttgtttattttaattgtgtaatggctgtccttgggctattattttctattttccttgtcccaaagtgggatgaaatattgtccacagatgctcaaatgtcctgggctgaaaacaaattctactcattgaagctcttattgaagttaaccaagatattgatgggacattctcttagaccattttaaataaaactaaaatgatccccaagggattgatggtttcaggactgtttttttttttttttttttttttttttgaggcggagtctcactctgttgcccgggctggagtgcagggatgcgaactcggcggactgcaaactccgtttcccgggttcaagcgattctcctgcctcagcctcctgagtagctgggattacaggcacctgtcaccatgcccggctaatttttgtacttttagtagagacggggttttgccatgttggccgggctggtcttgaactcctgacctcaggtgatctgcctgcctcggcctcccaaagtgctgggattacaggcatgagccaccgcgcccaggcaggacttttttattgatgttgtatgtggttattcaatgtatgttttttcaaatctgtgatatatcaaagtgtaatccatcttttgactggatgtaatctcctttaaatcttaaaaagattcatgttctctgaatgatgccaccataataatgtttacatgtagtgagcatgtaaacaattgaaatgaaaacaaacatattccaaatgagtgtgaaggagcctcacttcaggaaaatgaaagaaatatgaaatacatatgttttcctttttcatagggattattattttaagagttgaaattggtttttgaaatatgttacattgtagaataagttcaacatacattttctgagcccagctatgtgccaagcactgtgagggaacacagtagtgaatgagatccttctggcctctaggggactctcagtgggggcagtaactataacacagagcagcctatggtaagtcctggatttttgaggattgtctttttcactaaatcagacttttttaataggtggagagaagaataatggattgctttaataatctgttgtgatgggaaagtgtttcattaagaatattgttatctctaaagtgctattgccaggagttgattcttaaacttgatcaaagtggtgttgtgtgaagaggctgcagggattccttttctcctccccttatccatcattcactcctatattttattagggggatattgtggctttgttgtagaagtacagggtatcttacaatgattttgatgcatattttcaactgagaatgatttgtttggtttgaatgaaggattggactctgagagtaggattcttttactagtacaactatatgtcttgcctaattatagttctttcttctaagatcctcaaagtgtggcctgtgcagtgtaaatatatccatttgtttagtatatctaattaagttcatggatcatttctaaagtggcagtaatctgcccatttattcaactgattgtactgtgacatgctggataggatcagtggtttatgggacttttgctctgatagaaatattaatgagtggaaaaaatatgttgacatctcgctacatgatttaaagcttagtcttaataataccttaaacttgtaagactgtttataatagaacacttggacaattctcttatttcatttccccagaattttattaaataggttggggaagcagcatgtgtctgtgcttggagacttgggatcaaacctctgcattattgttactcgctgaaaaacctagtaacctttttcttttcttttctagacagatagctctgtcacccaggctggagtgcagtggtgcgatctcagctcattgcaacctccacctcccgggttcagacaattcttgtgtttcagcccctcaagtagctgggattacaggcgtgcaccaccacacccggctaatttttgtatttttagtagagacgggctcttgccatgttggccaggctggtctcggactcctggtctcaagtgatctgcccgccttgacatcccaaagtgctgtgattacagggtcttgctccattgcccaggctggagtgcagtggtgtgatcatggctcactgcagtctggacctcctgggctcaaatgaccctcctgcctcagcctcttgagtagctgggactacaggtatgaaccaccatgcctggctaattttttttttttttttctttgtagagatggggttttttgccatgttgcccaggctggtctcaaactcctgggctcaagcgatctgaccacctcggcctccctcccaaggtgctcggattacagacatgaaccaccatgcttggcctgttcccatttataaaagtggaatcataagagctgttcttaccacagagctttagttgaggctgaaaacaatataaaaatacatttgcagtttttctttactttgtatcttgccctttcaatttatcatatgaagaaacttattctcagaggtggtaggagacctatcaaaggtagaatagataatgacagccagacttaggtcttctgactcaaaggtttgagtttttccccattgaactaaacttttgggtagacacaatatcaactgattgttgaaatagaaacatttttatctactttgatttcccccctgtttttagataaaagaggggtacatgttcagaggaatgtaatggctttctaagtcaacagcctctcaagtggtagataccagagcagtctcctagccagatgtgacttccagagctctctgccttccctggctcactttctcttcattcaaattattctctagaaaaggttgtcatttaaaggtcatcctgtcatatctcaaaggcactgcactatcccaatgccgaaaaccccctatttctcttgtgtgcaccccacttttcagggaaagtagaaccacaaaagtagaactttcaatattgagctgctaaagtgttccaatattgggcttaatttaccaagttcataatgacaaactgaaaaagagtagtccaattaaaatctggaaacagatattaatactttttaaagaataagtataatgataggtaaggatttctcttttgattctcactttttaggctttgttctatatatttaaatatatagaaattcacatatataaataaacaaaatattgtatatattaaaaaaaaagaataaggataatgaacaatgctaaaataccatgtagtgtgagtctggttggaaacaaaaattacctttaacaaattctattttagttagtgtttaaacacagcatccacattttgaaccaggtttcaacattatgagatacgtgtttggataattgtatacttcatggaagtataataaacatatatgtactaataatcctttcttaagaatatctgcccattgaagggtcttgtaggttggaggcaaagtttatttatataacttattttttattttttttttattttttgagacggagtctcactctgttgcccaggctggagtgcagtggtgtgatcccggctcactgcaacctcttcctcctagttcaagcaattcccctgcctcagcctcctgagtaactgggattacaggcacccaccaccagccaggctaatttttgtacttttagaaaagacggagtttcgccatgttggccaggttggtcttggactcctgacctcaggtgatccgcctgcctcagcctcccaaagtgctgggattacaggcgtgagccactgtgcccagccaatttatataacttatttaatgtgtggttatagtttggatgtttctggataatcgtttaaagatgcaccagttactggattacagaataagatacgtcaatttaagtttcaaatttcaaatgcttggagactgccagatttcatagatttggaaggggaatccctggaaccaaatctcagaaagttggccaggtagccaatggtggacactttctgtgatggagctttagctactggggcagtgtctttgaactgttctcatcagtgcagagttctttttatttgggcaaaatcagcctttctgttctctagatacaaattatgtctaatccttctttcacatggtagcccttagacaacagatttttgagaacaggtactaattctctcttagtcttaattttcctcttttctaggccaatcaaacctaagttccacatgcttttttctctatataaaatgatttccatataattatcctaagctttgagaataatgttttttttttttattattttgcacaacaggggttttcaccaatttttattataaaaggttaaaaaagaattaaagattacagaaaggaataaaatgagaaaagttaagtattctctcccctccctgatcatttaggtccttgcctcagagataacttctactaaaagtttctggaaggactttcaacgtacaacatgagtgtgtgtaaatatatatgctttacacatatatgtatatgtatgtgtataccattagaattataataaaatacaaattcaaagtttaaccatgttcatatatgtacattgttcaataatgcttaatgacaaaaatagctacaatttaattattataattcagggattatgctaaacactgcatatggtgtcacatttaaccctcataagaatcctataaggtaaatgatagtaacggtcatcttatagttgaataaactaaggcacagagaggttaagttgcgtgaggttacacaggctctacttattctatattgagtaaaatgccatagagaaatgcccatacgattgcaaatgaagaatttagtggtgaatttttttatttgcttctttctctgaggcaaggaaaaataggagtgattgagagaaccaaaatgagttcagttgttttttaatcccatgaaagtacaaatatgttttctttacttaaatatagagaatttaaaaacactggaaatgaaaacagcaaaaacagcattgaataaagctgattaagacttgatacggcactgagagaacaatacaattgatgaagcattatacatttttggaaaaatatattgcaaatgaaaatggatccccactgctcttaggataaaatccaaggtattcttaacaggacatcagaagccctttgtggcacctgtgaaagctggcccaacaaaacttgttgtcgctccactggtagatcccctccccagcctgcacctccatctttatgtttttgcatacactgttctctcaactcaggccaacttatcccatagacccctggacacccacttttccaggttatctcctattcattcttcagggtttagctcagatattccttaatcgcaggctgcatgcaatggtcattctccatgctcctcagcagcctttacttccgtatcacagctctcatcacattgagttgtgacatgctgcctggcctgtctctccctctagtctgtaagtaaagttcagagcaaggctgggtcttatttgcctttgtagtcttgtcattgcttggcatttattaggagcctgataaatacttgttggatgcacaaaagcatgaacggattttgaatttttaaaagggcatttataatgaaatatgcccatccaaatctaaaaataagcatacagctaggttttaacagaaatgaggccaggtttgagagaaatgtaactgttggtcgaaagctagaccaattcagtaatgagcattttttcatatgtaaagacactggaagtgaaagaaagatggttaatatatagcctagatccttaacagttttctaatatagacatgtcaagaaagaattagcttaccaaaagattgtgctttttcgaccaacaaatacaatctactgtatgattcatcataaaggtcacttttttttttttagccaaaaaaggaaactcaaaatgtatacaatttttttaatgaactgacaatagatgactttcatctatagatctgtgtatttcttaatcggtgtcattaagttttaatcttagccattttcaggtttaatattaaaagttctttgtatcatctttggccgtctgcagttgtatataagctttgtgctaacttaactgcttttttaaatctgtgctcaccatcttgaactccttttggaaaaaagctatgtttgagatggatgaagaatgctggagtttagattgtgcatttccttgttgcgaaaggtgtaactctgaaaaaactaaattacagttattgtatattaaacagctattcctgaaatttacttggaagcttttgaaagagtagctcagtatctgaggagaagttcttcacggtccaagaaattaggaagttccataacatgtgccaagggatctggcaatttctactacctttagttgctttatcccacatgtcacaggccatagtctagatgcaaaaaatatctttttatttcaataacacatcagaacatagttttaaaagtgctagagatagaaactttaaattaaaattaaaatgcgtgtagtattaacagcgcaaatgtcaccaccaaggaagcaaccagatgagccaatgcctcctgtgcagtgttaagtttgcatgtgcagaaaattactgttgttgtattgtggtgtagtactctacctggtagctggcaagtgtgtttggcatacattgtaagccacttcctaattttagaagtgttatgctgtgaaaaaagtgcaattagaattggagatatttgacaaaagtcagggtgaataaatagtataataatagttatataaagtgcaataggggtgcagaagaaggagccataattttaaccaggaagactaaagaaggccacagtggaagttgatatttgagccagaaatctgtaggaaaagaaagaaagaaaacccgttttgggctttgggctaatgcacagtggcatcatagtgcatggtatgtttagagaattgcatttaggcttgaagctggagcccagatgggtgggaggtgctatagcagatggtgctgggaagataagacccaggtcagggtgagtctgcttgaggaggttggactttattctgcaggcagtgggaggccactgaagatttggagatggggtgaggtagggctgacttatctactaggcacagtgtctagaaaccacaataattttagggtccacaaaaatgtttacattttaattgcctttaaaaatcagaataaaataaataagtataacaataatgaattcatctttattcaaatgcagtcattaaaatatatgttttttttttgtgttaatagaggaataggtccatgaaggtaaaaatgcctacggcctacaaaagtcatactgcagccccagggaaaagagggcaaaatgtgaatcctggagataatttacagctgtgtgaaggatgaatcccaccggtggttcctaactgtgatctggctgcatcagatgtacctgagtaaacacagattccctactatgcagccgtaaaaaggaatgagatcatgacctttgcagggacatggatggagctggaagctgttatcctcagcaaactaatgcaggaacagaaaaccaaacactgcatgttctcacttataagcgggagctgaagatgagaacacatggacacatggcagggaacaacacacactggagcttgtcagggcatgggtggggcgggggaaggagagcatcaggaagaatagctaatggatgctgggctgaatacctaggtgatgggttggtctgtgcagcaaaccatcatggcacacgtttatctatgtaacaaacatgctgcacatgtacaccagaacttaaaataaaagttgaaggaaaaaaaggaaaagaaaacacagattcctgggccccaagcatgtttgatttaggaggaaggggaggggtgtgttggaagacagagcatgccagtggaggaccaggagaacaatcaaattgcagtttagctgatgacctgagaaacaacgaaggccctagccagggcagtgtcagtgagactgggaaaaagtcagcctggggaagcattgcacaggtgaatgacagactgacaaccaaccaatggtggggtctgagatacaggagatacctggatggcagcaggagagaaggtagtatttctagtctcagccagaagtggaaaatgtgatcaactgtttttctctgctgcaagttcaccatgaacatacttgtggaagggctgagaatactgttagcttggcacaagctttcaccaggctttcagctttttggtaggctgcccattaggctgtgcagatgcccaggggagtgctgtggaggggtgtgtggtagaagcaggccctgtgtttgcctggaggaagagtgagataatgggtagaaatgctagaactgaagctctgtggctctgggctgagtccaggcctaaggcccgaggccagtacggtgtctgtatcgggtggccccttctcactgggagagccctagactctggttccttgcttggtgatggaggcacagcaagaataatcaaacacctgagaaacttggaagatgattattgaaaccagaatttttttttcagaattctctggaaaaaataaaaaaaacaaaaaacaaaaaacaaaaaaaccaaaacaaccctgaccccagaaattctcaaggactttcttgtaccagcatttggccacttgagcattgcggcaaaaatcttagcagataatagtcttcatttttccctgatccttattcttattttagtttcttcctcttctgcagtctttccctctcttctcttcttttgtccttctctttctctttcccacccatcttcaacttccttatccctctctcttctcctttgcctcttgtactcatctgctcccctcttctcttttctcctccccttctctctagtcagtgagtcagcatgcctgggagatgtggagccccatgccatatgcagatgactgtagttttgggatatgtgtacgcatgtgacttagctctcagtctgctgcatgtggctcaaaaggtgtgaagactggtgtcactttccaatttaggcaattgcatctggcttacctaaaatttcacttgctgcttcaatcagcaaagtgtttcttccatactgtgacttggtgatgagaggtttcatgagctgcaataccagaggcagttgcatttcattcagatgaaggaatgaattttactaatccacagcccgagagtataagataatagctcaccatttcttcccctccatctctcttactttacctctgtaggaaagcagatctttctcttcttcttccctgttgctgaagcctagatatattgctctattttcaacccttccatgtctaaattagttgaggctgttgagcagtgggagtactagggaattatgagtcaggaactccaaatgtaagctctgactttgtcatttacaagctgtgaccttgggcaagtcattcaaatgagaaaaatcatactgaccctgcctttttcataggcacagtggaatgtgagaatgtaaatgaatgcatttgcagttgatactcttcattcattcattgcataaatgtctcctggctgcctactatgtgctgccactcttctagccatgggggatacagtagacgataagatagataagaccttggcacttatgagtttgattatagtgcatgagcagtgaacaaagatatatggttctatggtatgctaaattctatggagggctagagcaagcagagaatagctcaggatggtagtaggatggggagacctatcttccaggggctggtcaggaaaggcccttctgaggagataatgtttgagctgacacctgaagaaacagaaacaagcaggaaaaagaaagagcagagtgtagggcatttcaagttctaggtacagcaaatgcaaagacctggagaagggggatagctttgtagaaagaagtgtgtacctgatataactggtgcttagtgaactaggagggcatggccacaaatgaggtttgagttgtgtttttaagagactgtttggctgcttgcatagagagagtttgaggtggcttcctaggtattccacattgtaggcaggatttctacatcatagacaaggtcagcaattatactgttcaacactaagtatcagtcttttaaaaatttatttatttatttgagacagggtcttgctctgttgcccaagctggctggaatgcagtggtgcaatcatagctcactgctgcctcgaattcctgggctcaagcaaggctcctgcctcagctttccaagtagctaggactacaggcatgcaccccaccatgcagggctaatttttaaattttttgtagaccagagtcttgctatgttgcccaggacggtcttgaactcttggtctcaaggaatcctcctgcctttggcctcccaatatacagggattacagatgtgaaccaccacacccagcctaaatttaattttttaaagacgatttttttttaagagaagttttatgttcacagcaaaattgagaggaaggtacaaagatttcccatatatcccctgcccctacataggcatcgcctctcccattatcaacatcccccaccagcaacatactttgttatgctctatcatatgcagaacttacaatgatccagtgaagtaggtggtattaacaaaatgtttttgagagaaggttcaattaggttcaatgagcttatacacagtgaaactagcagcagaactcaggtcttctgccatattgggacatgagagagattttcagaagaggaattgacatcttgggcaccctgtagccaagatatatcagctactttaggaagagacaagctggagggataggacaggaaaagttgggttttaattgccagggaaattggtttagattgccttgaaagtatagcaggattttactgtaattattggtcttaaaattcagccattaaaatctcctaacaggagataggagcctggctttgtctctgaatgtgccaggagagaactgtctccattatgcctctcattggcacacagaggctgggaaactttcacacactgtctcgttttgtgagcatttgcagttgtaacagaagacagctctattttatatcttgctttgttttcaagccattgcatgaaagccaggcctcttggctcttaaaaattaacccccccaaacctattttagtttatagcagtgatacaggttaatgaaaagaatatttaaaacaattcagagagtagtataaaaatgaaaataaaaatccatttttttctatcttctcacacagacatggattcttgcatattcacatatacatacatccaatcatatatataatgtacacttgaattcctggaatccatctatacatgctattatataatgtgatgttttatttaacattgtcatagataactttctatattagtacctaaagatgtaccttattttctctaacgattgttttaaattccactgtccaaattcctctattgatagggggtaaatatctttgagcatatatttttatatattgtatatgcagtatacctgtgggaaaaattcctagaagtggaattactaagagaaagaacatatgcagttcacattatgatagatcctgcattgttgctaagaaccttgcactaaattaagtttctaacagtatatgagactacctgttttcccacattcttgtcaaagctgagtattgacaaacttcttaatctttggtagactcatacatgagaaatgatgataatggtttacttgaaactggcattaaaggttgatatttctgtgaattatttttgttttcagaaattaatttgaatagcttttcattaggtaggcaatacatattcaaggcaaaacaatttggaaaatccagaaaacacaaagaaaaaataaaaataactgataaacttgtttttcatgaataaccattgttaacatttaggatatacctttttgtctaatgcatgaagtgtgaatgagaaaattttattacagcagtggggaaagcattggagttggagccagtggttgttctagattcaagtttttaacattgctgactagctttgtgaccttgggcaagtcatttaaatcctctgagcctcagtttcctcctttgtaaaacagataatgccttttaatatgatttggctttgtgtcctcactcaaatctcatctcgaattgtaatccccatttgtcggagaaggggcctggtgggagatgattgaatcatgggggcagctttctcccttgctgttctcatgacagtgagtgagaactgatggttttaaaatgtggacttcctttctcactttctctttctcctgccaccatgtaagacgtgtcttgcttcccctttgccttctgccatgattgtaagtttcccgaggcctcctagtcatgcttcctgttaagcctgtagaactgtgagtcagttaaacttcttttcttcataaattacccaggctcaggtagttccttatagcgatgtgaaactagattaatacaccttccttcctttgttttcttttcttttttctgaagcaggttcttaccctgtcacccaggctggagtgcagtgacatgatcaaagccccctgcaaccttcacctcctggggtcaagcagtcttcccacctcagcctccaagtagctgggattacaagactgcgacaccatgcccagctaatttttaaattttagagatgaggttctactatgttgcccaggttggtctcaacctcctgggctcaaatgagcctcctgccttggcctcccaaagtgctgggattacagacattattgttcaggcacagtgagccaccatgcccagccaataatgcctttcttatcagattgttaggaagaacaaatggaataaggaatagaaaactgctcactgtattccttgccctatagtagataacttgataagtgttggctgtgctgaagttcaagtgaagtaaggcagtgttgagaatatttttcttatcctgaggtttcttcaaggtggagaattttttctcttcagtttacaaggcactgagccttgtctttgttatatccattttgggattgttcataagttttttctctttctttattttgtttttatttttttgagacagggtctcactctgtcacccaggcaggagtgcaaatagcacgatctcaactcactgcagcctctacttcccaagctcaagcgatcctcctgccttaccctccctcatagctgggactgcaggtgcacgccactgtgcctagctaagttttttttgtttgttttgttttgttttttttttaagatggagtcttgccctgttgcccaggctggagtgcagtggtgtgatctccgctcactgcaacctccacctcccgggttcaagcaattctctgcctcagcctcctgagtagctgggattataggcacccaccaccatggttggctaatttttgtatttttagtagagacggggtttcaccatcttggccaggcatgtctcaaactcctgaggtcaagcaatgctcccacctcagcctcctaaagtgctgggattacaggcgtgagccactgcacccagcctctttttcttgttttcccagtgtttgtttaaaagctagttcatgtaaggcagtggttgtcaatgaagggctatttcatgccctcctcctgggacatttggtaatgtctggagacatttttagttgacacaatagtggggggaactgttactggtctctagtgtgtagaggccagggtgttgccaaacatgctacagtgtacaaaacagctcctcacaacaaagaactttcctgcccaaaatgtcaatagtgccgaggtagggaaaccctgatatagggaatatattgaatgtgaattgaagttaatgaacctggtgaagtatgcatctatggactcatcaagctaatggtacttagtggtcggccctataaattgaactataccctacaggaatttctaccaggctgcaggaggttctttgcttttcaggaagatggcgtggaaagcatctaagttataaaagggctgtttggctagggctatcacctggaggcagccgaggtcctagaagtttgggtctcagttttcatggaatacaaggtagacttcctttgttccttcaagcatctattcattcagcaaacactgttaagtgaccagaaggccaagtactgtgctgtgtcagataaaaaaggaaaagaaacaaaagctaagatatttcctcttaaaggagcttagaagacagtatattattgtggttaagaactcagatgtggatctctgctgcgtgggctcaaagcctggctttgccacttctagtttatgtgatttagcctcttgctttaggatggagttgagaatatctaggtcatatgattgtgtgatgattaaaatgttgatgaacacagtgtttaggagagtgtctagctcaatgaaatttgcattcttgtttttgttatttgtactgtactactcctactgctaaggaatcttggagccttatggattttctagtttagtagtttcaagtttgattagtactggattccttttctcaatatagccttagccagactctgagtatataaaatacagatatgcatagcttaatatagccatacgttctgagaaacgcatctttgggcaattttgttgtgcaaacatcatagagtgtgcttacacaaacctgcatggtatagcctgctatgcacttaggctgtaggctatagcctattgctcccaggctacaagcctgtatagcatgttactgtactgaatactgtaggcaattataacacaatggtaagtatatatcaaaacatatctaaatatagaaaaggtaatgcactgcactaagatgttatgatggctgcaacatcactaggtgataggagtttttcagctgttattatcctatgggatgactgtcatatattcaatgtcattcacctaaacatcattatgtgcacatgactgtatatgagaacagcagctcttgttaaagtaagggtgggagtctggacactgctttctgggaccactcccctctctccccacaacagtgttgtctgggagagaacctgggactgtgtagaaccctgtttgccacccagcaatctcatccagtccactcactttgagtgaggaaactgaggcctagagagaggaagtgatttaaaaggaggctaaagcaagacaggagtagctctaatgtacatgtgccaaacacagacagggtgctctatgagggagttcagagaaggtagagatgggccccttcttggttaggttgaggtcttgaaggatgggtaggatttgaacattccagataaagttggaaagagtattttcacaggaagaaatagaatgataaagggatggaggaaaaagcattgtagtctttacccgtttcttagtcagtctatttaaaacatattacttaaaaaccaaaggaaggtagttgtcataaagtcacagagtaattcctggggcccaggggcagtggagccagcccatatgcacctggtaccccagaagtgagcacctcctggaagccccctctccagtgccccatagttcttgtttcccttcctgtgcatttgctctgcccttcactctctctgaagaccagctttattgtcttctctgtgtacatggcttcctcagaggtcctgaatttctatgccactgcttaaagcaaccagttctcaacgatcatctgtctctgaatcccaaattctaaattccaggaggaaagaatccaattacacatataggtattatttgtgtgcgtctcatccaaaattttagacagactagggcatgtgaggaacctgtcttatgttgagatggatggcaaagccctactcaaagatgaaaaaggaggaaaactggccctcaagttgctcttttaccagcagtagaaagaagggtctatataactataacaaagtatgagatagacagtacaggtaaaaagtaagagggttgatgaaggcttcttgaatggggacattagtgctggctttgcagtgtaggcaagatttcttggtggagagggagatgggggaggacattccaaactagaagcttggaagaactttgcatgtttgagtaacagtgagcagttgagtacctgcatatgccagtacttcattcattcgtttagacaggaaatatttactgaggacctagtaaggaggaggatataattatggataaagaaacaaacttaaaatagttaaacggcttccccaagttcatagagaatatgaatatgaaccatatctatcatgtttcaaactcttgttttctccatttatactttttctacttgattctacaaggtcaaaagtgacttagagcaaggttggtggctcatgctttttttctgttttaaatagagaacttttgaaattgtgcattgtccttacatcctaaagtgagaataggccataatttccataactataaaatgatttatgtgtgggtgtatgtttgttttaggggaattgtttggtcaggtgatttctaccatccattctaactcaacatttcatgtctgggtaatattggcaaccagtttgatttaatttattacataattatttataatagaaaaacacttgaaactgcctaaaatgtcccaaaatagaggattggtttagaaaattatgatatgcccatatagtattaccaaatagaatattaagatatgcctatgtagtattaccaaatagaaaactaagatatgcctatatagtattaccaactcaaaaaagttgcttttttttaatggtagagatggtgtctcaccatgttgcccagtctggttgtgaactcctgggcacaagcaattctcccacctcagcctctcaaagtgttgggattagaggcgtgagccaccatgcccagctcaataaatttttaatatgatgggaagatattcaaaatataaaattagtagtataaacaagaaacagtctttatacattgaattaaactacataaacacatacacacatatatttgtatttacataggaaaattattgtaaagatgtgtattagtctaaaaatgaaggaactatcaaaatattacaaaacaatatttgggtagtagatatcagtaattaacaaattttaaatgtgttttgctaaaatctcaatgatgaatttatatttcataactacagttttatgtaactatgttctttatctgcatctacttttgtaactgaaatttttattgaaataattatagattcacatgcagttgtgagaaacagtacagagagatagctgtaaactttgcccatttctcccagtggtatattttgcaaaactctagtgtaatatcacagccaggatgttgacattgattcgttccacctcagattcccctagtttcttgtactcatttgcatgtgtactcatgtgtgtatgttaagttccacactattttctcaactatgtgggttcctgaatcacagtcaaggtaccaaacagttccaacaccataaggaacccccatgttgccatccacacctgccactattcttttaaaaaagtacttgaccccaatgggtcgggcatttattttattttgcttttgcatctgaggccataatggtggaaccttagagttgggaaggacttagcagtcttcttggttcctcaatatagaagttttagaggaggagtgggaggcattttataattctccaccctcctccaaacacatcatcagcttgagctgtcttcccaacctttgccccgtaacacctttgccttggtaatgcaggtctcaagttagatatcatgtccactggaaactcttgtctgaccttctaagtctgggtcaggtgcttctttgtgccctgattatgttctgtattttcctctttgtggcacttttctcattttataattgctcatagataataaataaatagtgaatgggtagatggaggtctggatgagagtcctttcccagtgtctgatgatcctgcaatggccgcttctccttcctttcccaccttgtgagtggcttttgatcctgcctgcacttcggccacagcacttatgtggcaagcccttgtttatgttgattgtgcccaattccagccttctacctgctgatggttccaccaggatgactaacttcatcttctgagcttgtcacatttttcttttccttcatttataaagtcagtaagatgattactttaagtagctatgagcctatattgtgctatgtgcttgatatatattataatagcttcagctctgttcaaaagaggaaatggctacagctgacccagagagcatctggggataaaatggggatagtaaaacataacttgaagtatattttattaaaatatgtataggaatatttttaatattttattcaatataataaatataaatattgtatttatacagtattcccactcatgatcctgaacaacttattattcctgaataagttgttcaggatcgtgtagccagattagtggcagaaatagattcaaatccaaaactgtctgttacaaagttcaccttttttgctctgtctgcaagaaggaactgcatctctagggatctgttttaatttcctgattcttccaagacttagaacatcctctagggacctgtatccaagtctagttcttgactgaaccctctagttaggtagctctggactttggaaggcagccattctattgctggacaagaaacattgctgggatgtttattgatgttcagtggaaatctgcccttcactctctcagttctgtatctaggtggcttgtagttctttcccttggtgcaacatacattcttttgaatttataggtccctcatgctgtacctaaaagggatttttctgggtttacctctttattttacagatgaagaaacttgagtccaaagagagaagccctgtttaacttactgcccttgagttacttgaaacctaatcttgcctttctggcttacctttctctttctagctctttcagtctttcctcatgagatgggttttctttactttttattaccctagtcattctccttatggacactctccagctggcctgtgtgcctcctatttttgaagctgacctcaatattccaaattcgggttgattgcatggagttcaacagaggatgtttaattctgcaaacaatgatgagatgccactatgtaccaggaacatgttgcaatcctctaccatattctgcctttctttttctttgtgcacattgtctacaatatttatgaggctagaggtttggttgcatatgtcacaaaggccatcataacagtggcttaagcagatgaaagtctatttcttttttttttgttttgttttgttttttgagacggagtctttctctgttgcccaggctggagtacagtggcccaatttcggctcaccgcaagctccgcctcctgggttcaagccattctcctgcctcagcctcccaagtagctgggactacaggcgccgccaccatgcccagctaattttgtgtatttttagtagagatagggtttcaccgtgttagccaggatggtctcaatctcctgacctcgtgatccgccagtctcggcctcccaaagtgttgggattacaggcgtgtgccaccgcgcccagccttgaaggcttatttcttgctcatataaaagtcggatctggaatggatgttgtataaagtagctagggtgccaagctgcttctatcatgctgcttttttaatctttagggtattactctcttcttcgtcatctaagatggccaactaaacattagttttccagccaatgtgaaggcgagggaagggcttactttttctctctgagaaacagcgtgtaagttgcagtcttaattccactctcatcccattggccagaacttaatcacatggtcgtacctggctgaaggaaagcctgggaaatgtagtcttttattctggtagtccatgcgaccagctaaaaatattcctaagaagaacaaggaggggagaatggattttggttggcaaatagcagtctctaccatacccctccttcttcagctccagggaaacaagtcctggttggttctttgtagccattggcttcccaggtttatgaagttccatttctaggaaaagtggcaaagcaggatctcccagaaattctcaggattctgtgaaagactgaaaatcagaatctttggtgtggaggtcacaatgataaaaatacctgccatttatttggggcttactatttgtttgctaggcatatgttaacatgcattctcttatttaattttcagatgaatcctagggggcaggtatgataactaattctaaatttacaaaccaagttttccaaagaggtgaaacaacttcccaaggttgtacagcgattacagggtgaagctgccacctgtttatcttagtgcactggagcctgaggtcattgcccactcagtttgatgccagacagaccagagttgctcattaacacttcataaagccctctcatgttcctcataataaccagacatttctaattataacttgagcagcaaatgttgtttaagataggttatgagccccaagttgaagggatggcttttataccatgtttgctgagtatgagctcaggtcagacaaaatattgggtgaccaaattggcaaagaccattgtccctgtattccattttgctgtcagcagtgctcttggtttattttcttttccatgaggaaactgaggcacagagctatcacaggacttattccatgtggtaatgttgggatttgctccacattgttatgataccaagctggaaatcttcattctcctgctgccacatgttccttactctgggggggcctggacttctatttcctcatgtcctggagtctctcagcatgtcctgggacctgggacctggttccaggcctgagtttgccagctttgctgtgtctggttagagatcacaggcttttctggactcttttttgcttatagctttgctttttaaattttttttctcctataaatatggcagatggattacgaatacaaatgttaacgtggggcactcaatgaagaaaggatgtctctatggttaactctcttttccagctccaaatcaggatatgtagactacaggaaggggcaatggaaaccttgatatttaagaataacaaacgtttggtgaattgggtggtggggcacctttctggaggatgaaaaggaatcaattatgcaaagagccaggtagaggtttcttagcaggatgatagcaaaagcaaatgccttaagtgcagaaatgaaaaagaggcaagaaataaactaatatcatgtttgagtcttacatattttggaatttatttattacggaaggagagacagaagctcattatcagcaatgactcccctcccctgaatcaacggcaatttttggacaggcctcaataatgctaggagtaagtgctgtcacgcttgtcaaatatactttgcttaggtatgtttggaaaaatgatcagtgtccttggtgaagtgttattctcttttgcttcattaaactcaccttaggaagtggttaaattgacagtgttttttttgttttgttttgtttccagaattctcttgacatctcccagaggctttgaacataagataccagtgctgtttttgatattagcagtggtttataaaaatatttaagtgactctttcctcttaacgtacattcaaatacttagagggttagaaattagaagattatatcagaatttcaaacctgggatttatagaaaattggagggtgctcaaagatgttctgttggcagaggagttgagttgctctgagaacaatggtggattcttttatttacagtggttacagactcacagatgtgcttccactggccacaatccatccatcactagcagatttgtacattgttccagtttgggcatttgggttctcaatctaatgttaattcacctgctcatattaagaattttaacataccaagaaatgtttttttaaaaacaaacaaaaacaacactatcccccaaattaatagtgggaattgaatagtacattttggccttattactcttctgggctcagcagagatctttggatatgcttccaataacaataaaaataacagcttggtgaaataaatggactcgtaggtggagaaccgaagtactgagaggagttttatcttctgattgcattgctctttggcattgaccatggataaaaaccatcactgctttatttttagtttataaagtacttctatggataacattttacttcagctttacaactgccttgtaaactgggtataattgtcttcatttcacagctgaggagactgaggcttaaaggggttaagtgagttgcccaaggtcacagcatagcaagcaggtgacagcatcgggattccaacccgtatgttattatataaattgtcttaaatcctgaaaacatgatagctttaaaaccttaaaaagcatcagtgccatctttagaacaatgacttaggatttttttttcctccatggatattgctttaaatgtttgaggaaataactgcaaattttgtttcatcctaaccctaataatgctctctacaatgtccctcagctcagaattccttgtgactatttgaagcttcagtctttaatattgccttgtgtttgattatatcatgtcaaaggcagagcctggaaaatcattattaaggatttgtaggttgtttgcatgaccttttaaagtaaaaaggatagatatgaatagaaataaataaaattattttgcaaagtaaccataaggcttcagccatgtctgtatctaatttattcactataaaaagttctactgaagatacattttgacttagatcacataattgagaaaaagatggcaaatttatcgttaggttaatgtaactatcccttctttggagaggatgataacaaaactgtcaaaagaaaaagatgcccagatgagattatacttgcaaaattttgtaggcagatacacaaactgcaagtataacatgtaaccatgtttgacaggagaagtaggagaacatgggttacaaaatccttaagcttgacagcctctggcaaggtggtgaataatgtgaggtcttttaaaatggctttcttgagataaagcacagaatgtaatgcatgcaactttcagaattgttgctggagacagcaaaaatactcttgagacagtgcaggctactgaggaaaatacatgcggtgatccagaagaaagtgagagcacgggctgttgggagaactgcaaagagtttccctgggactggggcaaagatgggtgaaggaggaatgcaggaggtgagaatgggaaggaaagcagttcccaggttattcaaggctttgtaaaccatgtaaccctgtgcctctaaaaatttctatgaacgggagtgataagataaaatttgtattttaacaacatgcctcatccctctggagaggattggaggggtccaaagctgttaggaggctagagatggaaatggcctgaactgagtaagatactaagtaaggagtagtgggtgtgtagaaaggtgggttggatttgggttttgcctataggaacagtgggaggaaacaaggtgactctcagatttctttgtatctacccattcttactccataacctcccatgctgtaaaatgatggtggtggtaacaatgactataaaatttgaaggcctgttatattataggtgtgaaacttctcatcacctacaagataaaattcaagtcttaaaggggcatgcaagcattccataatgtgcttgttgcctatcctaccaccctttggtaaacaccctgtgcagtattgctgaccaatttannnnnnnnnnnnnnnnnnnnaccaatttatagttcagaatctaaggtcagaattaacaatatgtattgagccagatactctggtacaaataacacgtgatcaaatcacacgtatgtctgtcttttttttttttttttctttaaacagagtctcactctgtcgccaggctggaagtgcagtggcacgatcttggctcactgcaacctccacctcgcgggttcaagatattctcctgcctcagccttccgagtagctgggactacaggcgcacaccacccaagcccagctaattttttttttttttgtatttttagtaagacggggtttcaccacgttagccatgatggtcttgatctcctgactttgtgatccgcctgccttgacctcccaaagtgctgcgattacaggcatgagccaccaggcccagcctatgtctgtccttttatggagcttcttttgtagtagatagagacagaaaaaataaaaaccctcaagataaaaagagccgtgaagaaaaaagagtagactaaggagagttcatatagggtgatcaggaaagcatctctgaaaaagaaacatttaaggagaaacctataggaagtgaggagggaagccgcgtggctcactgggggaatagtggaattgtaagtgcaaaggccctgagggaagtacatgttgaatagacgagtagtgtggctgcagcaaagacgcagggagaaaggtaggagataaggcaagaggggtacagaggcctgttcctatagagccttgtaggccattgcgcgagctttgatttttattctaagtgagatgggaaatgattggaaaattttcagcagaagagtaacatttgccttatttcttaaaagaacacctttgtttctctttatgaaccacaccttagggaggcaagggtggaggcagagacagcagtgaagaagatattgcaataattcagatgagaagtgattggcttagaccaggttggtggcactataggcagtgagaaaaggttgattatacctctttgtatgtggtaatataaaaatattatatacatttgtattagtctgttctcatgctactaataaagacatatccaaggctgggtaatttattaaaggaaagaggtttaattgactcacagttcagcatggctagggaggctgcaggaaacttacaatcatggcagaaggggaagcaaacatatccttcttcatgcagcagcagcaaggagaagtgccaagcaaaaggaggaaaagtcccctatgaaactattatatcttgtgagaactcaccactatcacgagaacaggagcatgggggtaactgcccccatgattcagttacctcccactgggtccctcccacaacacatggggattatcggaaccacagttcaagatgagatttgggtggggacacagccaaaccatgtcaacattgtacatgatatatgtagtacctaaatatatatagttttctaaattcaaatatacaaaaaagtaaaaaggggaaacacaggtagaaaccagaaacccatgtccccattactcagcttcgacaattatccactaatgagcaatttcattttttctaaagctgttcttgcccctctggattattgtgaagtagatcccagccataatgtcattaaatatttgaatatgcctctaacatgtaagggcctagctgggcatgatagcatgaacttgtagtcctagttacaggggagactgaggcttggagtgagaacctgctcaatcagtcaatcagtcaataaagggctccttttaaaaaacactgtcacaacattctcatctcatccagaatcttaatagtccttactatcctcaaatatccagcctgttcagattttcctgattcttttaagtgggaatcttatttttgcctttttatagtttgtttgaaccaggatccaaataatgtttatgcattgaagttgcttggttttaaagtttcttctctatgtctcttttgttcctgtgtaatttttgttgttgttgttgttgttgggaaaaaaaaccaggccatttgtactgtagattttccccaagtctagattttgctgactgcatccctgtggtgtcacttaacctgttcctttgtcctctgtgttcccggtagattaaaggcttgatcagacttacattcagattagctttttgcaagactatctcgtaggtcgtgttttgtatttccattggggatatacaatgtgtggttgtttctgttttttgtcatcactgtctagtgccattgttttattaggggctgcaaatgtaattcttactttttttttttgtttgctggactatttctatgaggaaaaactcttcctcatcagatatttggttatcctggagtaaagttcatatagcaaacaaaggaaaaaggcttgattcttaccctttatttaccagttttcaaaaataaaaagtaggtcccctatccttctctgagggtgacttatgaagcttctctctttctctttttctcttcattttattattatgaactcatatttttaaacacacattcatgtttcagtccactgcagttattacagttggccctctggggattccacatctgtggattcaaccaaccctgaatcaaaaatatttggaaaaacaccaagacaacaacaacaaaaaagtacagaataaaacaatgatttgtctagcatttacattgcaatgtaataggtattatacataatctagagatgatttaaagtatatgggaggatgtgtgtaggttatatgcaaatactacacgattttatataaggacttgagcatccttggattttggtatccttgaagggccctggatccaatctctcgagtatatagagggacatcagtattcttactaatgactaaatggaccatctttggtcatgggagcctctgaagctagctcctgaatgcttctaacacactcaagtagtctttgatgctttccttgctttctggtatcaccagatgttccaggctcatcttgtatgttttctgccccaatcttagaatcagccactttttcaaagggctctagttccttttagagggaagtggtgcataaagacctctggtgtgaggggtgctcactgctcctgagctggtttttgtgtctaggccttctcagtggacagagctaggagcaaattttttaaaaggtaaaatacattatggattcacaattatatttctttctcccatgccaaaattctggttctcagttgcaccagtgtaattacttatttgctttgtgccacaatacacagccacagaatcacaataccaacactatcaccaaaacaggttaaggtagttttgttttttgtttttcttttggtggtggtgggggtactggttgtatatattttgctttaagacagttactttgtatcttaaagttacttgaggtagtttctctctgtgtggttatatcatcaatttcatactaagctgggttggtttggctcattttgctatcacttttgaggggttgctttaaaatttatgtttgtaattatatagaatatttacatagtttcaaattcaaatctttaaagcaggttgtattcaaagaaacagcttctgtccctgccccctctaccctgttccctccctcacaggtaactctctttcaagttttgggtttatcttttcactttgtaaatatgtgtgtgtatctatccactctctcttggataagtgggagctctatacatatcttaaatttcggataaaatttggaggtagtacagacactattttctgaaagattggatgtgaggtatgagaatagagttgaagctaatgcccaggtatgacatgattgactgatagaattgaaccacctggccccgagtgcccttctttccatgtggcctggttagcctcattcatctttgcaaactccagctttctttgctctcaggtgctctcctctgtgctccattgatgccctctgcgtcacattatccttcccatatggtcttatatactgttttcatttgtgtttggctgtcagtagactgtgagcagcttgatgtcagacattatgctttcttattctgttttcccaccacctatcacagaacctttcacacagtagaagctcaatagatacctgagtaaataaataggccaggtgtaatgttgggttcttaagaaaaaaaaaatgaggtggatgttgttgtcctatttcacagatgaaggaacaggcactgaaaggtttaagctgcttatctaaagaaacagctaataaattgctggagtacgaacccgaatcttgtctgatgccaaggccacacagctccaactctgtgttctcattcagcagtggcatgtgagactgtccacaattagcctattaattgtgtgacctctgcaagaaagtgagcctctatgtctatttctacatctacgaatgcaagatagtaatggtgtgtacattatagggctgtaaagcatttagaataatgcctcatacatagtagggactcaaatcttagctgattttaggtacaattgttatttttagtagcggaatattagaatactactactaccactacatacaaagccctgtgcttggcactgtgtatggagtcttctttgactcaccccatcttgccttctaggagtttgcaggcaatgtgcatatgcttaaagatttcaagaagggcaactggggagtggtcagtcaacaggcagtcacttgagattagtgccaaatgcagggaaagaggaaagaaggcacttgcaggtggccaacttgttagataatagtccctcacccctgggcttctggggcaaaaataaaaaacagaagccatggtggagatttgaatgcttctgttccaccaatgtcaccattagtggcagccaaatacttcgactccttgtccagtttggtgagactcctaacagtccttgccttgtagcattaataagttgcacaaatcacaatttaatactcacattatatagactctatgagtcatggggtcacccagagttcatgggaccttggagagcagcaaattccacctccacattttatagaaagagactttgtccagagaaggaaagccatatgtttaagggcacactggtatttggaacttgaactctgttggttaaccttatgggtcagatcatgcagattcccaaatgcctggacccttgcctgggagggagtggactctcaatatgcaagagtgctgagagacgagggatgatggctccactgttgtgctgcccacattgtatttggtgagtccaggctcctgctcttatcagaacagcaatggtagctgctggaggaagagctggcctccctcaggatgtagccatttctgctgcctgattcatattgggcaaggtcttctttgggcccttccatagctatagccatctatgtgctattggcgattgcactgagacctctactctgtcaaaaagaggtaaggaagaatgtgatagtgaaagggcatgagatttagagccacacagatctggtttgtgttctgaccccagtgtttcttagaggtgtgacttttatccagtcatttaacttcactggaaacctcaatttcctcctcaataaaatgggcatgataatatccaccacagcaggttgttgtaatgattaagtgtgataatctatatgaagcatttggcagaaaaaaagtgtccaaagaatggtagcttctctgcctctctccccgactctgcctgaccttcatttagggctgtctgtcctctgtcacacagtgtggcatagggctgtggctgtgttattacactttctatttatcagaagctactgaggggtgttgaaagatgtagactttaggctccactctcagagattctgatttgaaagaaatctgaaaatttgcattttttaaaacaggcaccccaggctattctgatgcgtagcctggtacctaggctgacatttaaccttgggaacctcttgcaccactgtttgccagaccccttagcttgggcgggttatgcaacctctctgagcctcatttctgcacctactaactgggactgatagcctgtttagcaaggtccttttcagggtgaaatgaaacagtgtgtgtgaagcatcttgcatgaacctagcacacagcgggagcctggtgaagatgtgaagaccgataccagacaccaaagggctgcattgccttcttccaatctataagctagccgtggccctagttccttctttggaaaccaaacccttgcaatgtatctgtccacctattcttaccattctgtggattttgcagaggacacattgttcatgatggaaagccacctgcttgcctgtcacctgcattttttggagaccctttttatggttattagtgcctgtctttgaaatttcagcacctgtgagctctgattgtgttacctgggatctaaaaaggcagcagaggagaacagatgctgctaatgacttatcagctcttttgtccatagtcttctcaaagaaaaaaggctgtgaccctgggtttgtcagcactgatatgctttcacaccacaaagggacttgacaatgggcaggtttccaagtctgtagagtggttctttgggggaagatggaaagcatatttacagtttggttcttcgggctcatgctctttctccaccttctgtgctctgctgccactacccctggaatgctggtgcatgtggcttttgaacatgagagtcaaagacagcagctattgaccctaaaggctgtgtgtgcctgtggggtgggtgggactgggcagcaagaagaggctgaattaggaaagagcatcttgagccactgtcatcatccctttgtgggaccaagtccgtatgagggaccgcgatcatagctggattgtagttttccactcctgcctgttcaagccttagaaactagttttcattaatttcattgctatgcaatgaatgcatagcagttttccactcctgggtatctgttcttgcaaatatccttagattaatgcagagcagacatcaggccaaggtctgccttttttgttctccagcagtgcttttgggtttgactgtttccttttatgttttaagcttttaacaaatataataggaggcagcaaaatgttgtcagtggaacacaggctttggagtgagacagacctagggaagagcctggctgtatgacctaaatttttgtgttgggtcctgctgtgggctgaatatttgtgtcccctcctttcccagattcgtatgctgaaacctaatccttaatgtggtaatatttggaggtagggcctttgggaggtgattaggttgtgatggcagagccatcgtgaacgagattagtgcctttataaaagagggccccagagaacttgcttgtctctttcaccatgggaggatacagggagaagatggccttctacgaataaagaagtgggccctcactaggtaccaaatctgcaggcaccttgatcttggactttctcgtctccagaactgtgaggaatacatttctgttcttaataagccactcaatttatagtaccttgttacagcagcccaaatggtctaagacaagttctcactttgctcctctgtaaaaaggggataatcaaacttacctggcaacataattgtgaagattaagtaagataatggacataaagcttgtagtctagttcccagggatcaaagggtgcttaataagtgatggctattgctgttatcatcttgctgcacttcaatgcaattgaaattggtttaaaagtgaatagaaacggttggtttcttgacggattcaattcagttcaattaagtgtccttttttagatggcttaccctggtaagtgtcatgctgaatacttgatacagatagaaattaagcactctcttctcgctaagctcttcttgtgcattctcaattttgcgttgcagctttcaacaaaagcatcccctcacccttcccagtgattctaaatttctttatctactcatttgaaggttagtttgactttcaagccttttgagatctgagcatcattcacctttgcggtctcacctctcacccctctctaatataccacccagttctgtgaggaaacaccataatatcttggctctagtatgtaccattgccactgcctgatacacattcctctccatttcagagtcttcctccttcctcctgtgtagtggagacgcaatactcatctgtcagtgttggatgaggatttatgcatataatttttttgtccgaagagcagatggaaccacacagaccagactgcaggaaagagaagagataaacagtagactaccttacctgtggtttcactttccaaggtttcagttatctgctgccaactgcagtctgaaagtgttatgaaaattccagaaataatccattacgttttaaattgtgtgccattctgagtagtgtgatgaaatcttgcaccgtcttgcttggtcctgcctgggatatgcatcatccctttgtccagtgttatgttactgcatattagtcacttagtagttgtgtaagtgatgagattgactatcttggttattgcagtgcttgtgttcaagtcacccttattttacttcataatggccccaaatcacaagagtagtgatgccagcaacttggatatgccagagaaaagctgcagggtgctccctttaagtgaaaaggcaaaagttcctgacttaataaaaaaaaaggaaaaaaaaatattccgaggttgtatagatctatggtaagagtgaatcttttatctgtgaaattgtgaagaaggaaaaagggaattcacgctagttgtgccattacatctcagacggcaaatgttatggccacagtgtgtaagtgctgtattaagatggaaaaggcttcagtttgtgagtggaagacatgaacagaaacgtgttccaattgatggcagttgggtttggtattatctgtggtttcagacatcgactgcaggtcttggactgtatcctctatggaaaagaggggactactgtactagcacctgcattggccagatgctaagtagaaacagaagctgccttgaacttagggaggccctgggtgtacagtgatttttctatgccatttgtggtgccatttctgcagcccaccagggtgcagcctgcagaaggaaagtcacacagctctttcctccctccaggggtccttacaataatgaatgatggcaaagagtcaaagataggatgatgataatgcctactttttattgagcacttcttgtagatacatgcacatgtgtgtatttcattcttaacaagtattattgcaaaactgaggttcagagaggttgcatcacacccttgagcatgaagaagacagggagggtggctgtaataatagggacagtcctccaaagcatgacatccgactcttttgatggttgggcagctagtgtgccagggaaataattatctgtctccttagcaacccccaatatttggcttagttgtcattgatgcatttcagttatcttcatgtcgttaaagaaataggtctcaggaaatttaatccagctagcagtgctatgcctagaattcaattaactccatgatttgcaattaatgagccctcatgccaagattgaggtcatagcattaatcttacttttattttaggatttccactgtcatgatttacagcgaaatccagccaatcttgtcaggattattggagcataattaagccagaaaggcaggcagaacagctagttaacatgggatccagggagggaccacatacctttgcttggtaagcctacctcaagcaggatggggctacatatgaggatttccatctaaggactgtttcccagatgcctgatctgtatacatttcaaatccccatccaatctccaaagaaaatatttccgagtcccagttggtgagcccttgtgagttatgttgttgttaattcaatgctaccacatccacctccacctcaagttgccatttactaagttgtaaatgtaacagacagtgagtgggcttttacagatgatggatttaatatctgtgatgattctatgaggaaggtatcataggccttctctctgtataaggttatacagcaagtaagtggcctttccactgaactgatggaaggttgtggcagttcctagctgcagaccatttttgtgcttctctccctttcgtgtgtgtgtgtgtgtgtgtgtgtgtgtgtgtgtgtgtattttgcccattaggatctcctccactttcccatatagaaataagaaggtaggcatgcataggcaaatattgtttatgattgccttctaggtgacaaatactcatccatcattatctcatttaatcatcgtatacatgggaggaggatattatctacctccattttacagttgagaaaactgaggcttagagagatttactagtttgcctgctgttacacagatagcaaggaaggagagtcagtgttgtgaatccaggtatgcttgtttgcaaatcctaggttcttttaatcacaacacgctagtactaaataaatgctttttctcttttcctggttctccaggagtggttattattgagtcgagaatttttgggaaaagtaacacgtggagagtcaatttttgagtggaaggagtctgaagagagggtaggaaccaacctcctactacccaccaggtaagggtgtacttttggcctttgggatttagcccatgtcttctgtatgtagagtgcagatccaggttggctaccatgtctggccaaccaagcacagaagccaacccctcccattgactttacttttgctcagtgtttggtttttccacaagggagggtagtggccagatgtttatgagaaggtctccataagccaagtccacaccagaagctgaccccacagctagcggtagctttctttgccctagagaccagtgaaacagaggagtagcaggttctctttgtacttaggtagcagattttcctccaaatgcttgctgtgggttttttgggttttctcctaggattcaccttcagactgtatctgcctccctgtgtagttagcatttagaagtgtcctcactgggtttgcttagcctcattgaacatttttatgcctggcatggcttactagagactacctattggaagtgcctactaatacaattttctgataatttagatgctgaaggacttccttgaaattttcttcggctggcttgggatggaatacttgcttttgaaatatgccctaaagagtgtgctatccctggggaaatccacttgtctcaggcaatattaatctgctctgcgaacagcttgttggaaatttgctgataatccatttttttttgtcattccatatctcagtgtgagagagtaagagaatttggtaaaagttcttactttttagcttgaccttctgaggtctgaggagcactcaccttcccagtctcatcttccatccctctctaacacaccctcaagttccctgaggaaacaacattatatcctggttccagtatgtattatagttggtgccttaggaaaattactttctttttcagagacccctgccccacccttcctcatctgcttaggggagactgtaatactcatctttcagtgctgggtaagcctagcatgttccctagtatgcttataatcagagctcagttatgatcctttcacttttatgtctgtccttgacatgatgttctcttaacctttgcttgctctccaacattattttgtactaaataatggactaaaatgcccttcagcccatttccatccaaactgcaattcaggcatcacctctgccataagccatcctctttccaacaaccttcaacaccacccccgctccaccacccctgcctgccacacacacacagacatacacaggctggaaataagctcctcagaatgcttatctactttatatgcaactttataatacttcttggtgtgtctaaacagtagaaaatcaactaataattataatgcagcactgtgagagatatgagagaaaaaatactaatgactcagaagactacatttcattgctaagtggaaatatggcaggtccaaatctatacacagtatcatctttatttctatgtatgtggacacacaacacaaaatgtgtatatgtacgtatacacaaaaacagaactaagaatgtaaggatatatagtctccaaaatgttaacagtggtacccttgtttattttcttctctatcttaatttcatcttctttggtttcagtagacctcaggggtagagaagtgagttaatcatactgctttgcagtctttatacggcacaaggccccgtctggttttattgtagattttcttttttttttttacttcatcagcctcaattccatcctcctcacccagccatttggtttctttctgatgctctttatgtatgtccttaagtgtgcccaaattttccacattctttatgtcttctatattatagatatatatgatattattgtgtaatgcaacgtattttaatgtataaaatataacaaaatataggtaatgtttatatttatatctgaatgaaaccttttttcataaattagaaactggaattcatgtctctgctttttacctcttttccccgttgtctcccctcccctcaacactgcaatcacacacacatgcatgtgcacacacacacacgtgcacacatacacacacacacaaaaatgaagattttcttgaccagttgtacttccagttccaaaatctcaggattccttgttgcatatattggttgactccctcccttgagctctctgatatatggttttgtaagaagtttttaacatgatttttctcaagtaattgagctcctagtttttagcatagtacagcagagtttgaacagagaatgaccaatggcaatgcagacagccttattggactaaggatggcattttctggtgattcgtatgtttgccttatcttccccagtctaggctctattcaagcatatggcaaaagggacacaccatttgcagttagagcaatatttgtttccttgccctgccagctactagcaagctaagtgacttgagccttaatttcatcattatgccttaaagcacttcaatgaatcttaattgacacccagaaatacgcattttttaaccttttgaaatttgtcgataattattttatgccccagcatatgtaaacacttgataagagggtatattcttcagttgttggttgcagtattctataaatgtcaattagggcaatgtagtattgttgttcaaatgttttcttcccataccaatgttttgtctacttgttcttaaaaagtctgcatttgtgattgtgggtttgtccctttatgtctacttttctgttcatttttgcttcatatacttagaagctgtgcatacatttagaatgatatggaataattgaccctttattattatgaaacattattccttaactctgtaatattgtctggaaattaatttgtatcatgttaatataggcctacctgctttcttttgcttactgtatgattaatattttctcatcctttgctattaacctatctgtaactttgtaattaaagtacatctcttgtagacagcatataatttgtgttttttttatgcagtctgataatctctgtcttttagtgatagtatctggcctatttagatttattataattattaatataattgggattaagtctactctcgttatttgtttctaactattgcttctgtttttagtttctctattcttttcagctttgttaggattaagcatatattttaatatgaaattttaattcttctggctttttggctatatatatgtggtacgtatatttgtgtgtgtgcatgtgtgtatatatataaatatatataaatatatatgtaaatatataaatatatatgtaaatatatataaatatatgtgaatacatataaatatatgtaaatgcatatataaaaatatatatgtaaatacatatataaaaatatatatgtaaatatatatatataaatatatatgtaaatatatatataaaaatatatatgtaaatatatatatttggtatgtggtttctccagagattgcaatatttattcttcacttatcactgtatacgtaaaataaaataagagaatgttatagcagtaaaatttcacttaccttccacccatcttttgtgctattttgtcatatatttttcatctgtgtaataacaccacaatacaatgttgttatttttgcttgcaacagtgatctttcagatgcattaagagaagaaaaccataatcttttatattcacccagacatttaccatttctggtacacttcatcctttcctacagatctgagttttcatctggtaacattgcccttaagactgaagaactccttttagcatttcttataatgcaggtcaattagcaacacattttcttgtgtttttaatataaaattttgttttgaaaggattttttgctgtctataaagttcttggttgatcatttttttctatcagcactctaaaaaaattcatttcattattttttgacctccattgtttctgatgaatgttagccattattgacatttttgttccgctatatgtaatgtatctttttctctatcagctactaagattttctttttctttttctttttctcattggcagtcttattctgatgtgtctaaggtgattctttgtatatttatcctgttttgggtttgctgagttacttggatctgcagcaatagtttttaaccagggacaatgttggttctctaggaaacgtttggcaatgtttggaggtatttttggttgtctttgcttagagttcagataggagaggatattacttgaaattagttaatagaggctagggatgctgctaaaagttctacaatgtccacgacaggcccccacaacaaagaattatccaatttacaattcaatagtgctaagtgccgaggttgagacatttgcattttgagttgaatttttttccaccaaatattggaaataaaatagtttttctgctccattttcttcctgcgtcccttcttagactctgcttacatgatggtaaactgcttgcatgatgttgtctcacaggtcactgagactctgtttttaatttctgtcgacctgccttcaagttcataacattttcttttgcagtttcgaatctcctgttaagatcatttagcaaaattttcatttcagatattatactttttaattctgctattttcttcttctttttaaaaatattctttgctgttagctcattagactacctctttgtttaagcctttgaacatattaataagcttaaagttcttgtctactaattctaatatctgaagcatttcaggttctatttctatttactgctcttttattgttcaatttttactgctcctttatatctgtagttttattgtatgataaacattgtgatgatactttgttggaagtctggattaccattttctttgaaaacatgttaaattttattctggaatacagttaaattaccgacatatccttctggtcattaggcttgattttattctttgttaaaatgggtctattgtggttttcaacttagtcctaggaatgcagcctttattccaaggtgtagtccttattcctagtgtgatgtggcctttctgatacagaaacactgaatatccagctaaatgcctgagatgctcagcaagagctttccattttggctatgctagagctccaacatatgccagcatttataacctctggtatatagtgctggtttagttctcaaccctgcatcaggcagtctctgctgggccttgtgaagtcttactctctatatttacagcccagacctcagctaaggactcagggtgaatttccatgcagtcttttccctcctatccctccagcacccctaatccctatgtccacactgtgcctctccctattttcttttatattgtcccacatattcctgcttcttagtagtttttgtattttgatccctgccttcacagctcaggggaccactattctacttgggctctagatcattttatggtaataggaaagtgcttccaggcaaaagctggagcaattgtgaggctcatcttgtgtggtttctttctttcaaagatctcagtccttcttagactgttgtttaatgcctaaaaaacagatgttttatataacttatctagtttatcacaggagctcaagtccaataccattatcatggttggaagtggaaatcaggaatatgcattttaagtaaagaccccagataattctgaaactgatggttgtgggttcatattttagaactgctgatgtaaattatttaaagtagatataaagtattcaaagtagccccagctttctgaggaattgtcagaggatctctactctccaggaggtctaggtattttatattttgcaaaggataaaggacttttatctgaaatgtttcttggtgtgagatccctttgagtgtggtgtatgtgtatgcgtatatttgctacagtgctgagttgtactctgtgttttcaccatcttgtgtatagacaatgcacaatagaataccacaccatagcagaatcattgatcaaatatactgcaagaatgaatcatccatacatgtgtgtgtacacacacagttatatatattttttttttcttaagatggagtttcgctcttgttgcccaggctggagtgcagtggcgcgatctcggctcaatgcaacctctgccttcaggttcaagcaattctcctgcttcagcctcccaagtagctgggattacaggcgtccaccaccatgcccggctaattttttgtgtttttagtagagacggggtttcaccatgttggccaggctggtcttgaactcctgacttcaggtgatccacccgcctcagcttcccaaagtgctaggattacaggtgtgggccactgcacccggccttataaacattttcaatatgtagttttatatgtaaatttcatgtgtcaataaagctatttttttcaaaaagttaagtcatggcaatgatttggggaagtcattttattttcctggtgcatccatttgaggcatagggatacattgctaatattctattgagtattaaagtgttatgagtctgggttctttcctctcattgtccaaggggggcttccagctctctgactgttatgttcctgactgtgcctgatgaaatgaaaaaaacatgggtcttgtcttcacaccgacatttggatatatcctaactaagtaatctggtgaatgaactgacctctgactctcttttgatttaggctagaagtccaatgcactatccattgtgccacagagcctgcctgcttgcacgaattgacctctttgagacacagttcccttatctgaaaaataagagcaaaaatatatttcagttttaatgtgtgggatactgtatattcctagcatggtgcctaacatatagtaaggccactttggtatatgtgtagcacatgtgtgtgttgtatgtagcacatagcatatatacccttaccttgatcttgtaaacgacaaacaatattcatccacaaccactgctacttttctggagaacagtaatttgatctttctctcagaagttggcttgcaatggcagctccagaatttctgccttggagctaagagaagacaatcttggtggaaggggaggagcttgagaaaacgcttcttagagctgcatatgcataacaagcacactggttttctaaaattctacctgtatatggggggttgtttgggaagactgatagagttctctcagttgccctttggtgcctatattgtctcccctgtctctcttaaatggaactgaaatgtcgaacagaaaatttttgccttatttttttctctttgcagttttctttaagtagaccatcagtcctctgctatctctattctctatcatagacaaggtcagataacagcaaggacattttctctgttccagggtggtaattaagagggaaatgtcatagtccattttatgcaatttaagccctgatcttttgattagagaagggaggaaaaaaacaattgatggcccctcactttctggagttgaggttccatgtggtgcccagaaccctttctgtttcttcaggtttctattgaggattctgatctcattgaatagatttgattattattatttcataatgcagagcctttttatttggtccacatgttgaagagtaaagattccttatttagaccccttttccctggcacatcataagtacttactttgtctgttgaatcaaattaagcaatatccatgtaaagttttatatgagagtttattgagtagaatttggattggcacctgtagcctgatttctttgatccttgaaggaacaaaatatgttacatccatttgactggaattcccctagcaccaacagcctggttgtgaacactgtgccctatctttattatacgcagagttcattttggtttcaatgtagtcattactttgtatttctcattttttccactcttatcaatcttttttcatgttgtcgatccttttgggaaagaggagctagtattggtttcttaattagttcttctatctctttgaagataaacatttcccatcaaatattagccttctttacaataaagcgcatgttgtatttcaagaaatctccatcttttaggcaggctttctcagtgggtgcagtgttgcaatcagaaattctgaaaagcttgaggagacagtgaaacagtgaaagcatctagtcatatttgctacctacagttaagcaaagaccagatcactgccaaagttgatctgtttggtcttccttgccatctctgccatcttctctttgattattgcattccatagcagctcagtttcacatacttttattgagtgcttactgtgtgccatatattgcacttaggggactgtgaagaggcatgaaacatgcttcttgctgttgaagactcaatagcaagtaattgagttgaggggaggtagactcattcacaagtaattataatgcaagctgactgctctgagtcctaggatggaggaacagaatgaggtgggagaatggaggcatgagagacaaaaagtacctcttgaaagaggcaggatggggaagtgaataagagcagaggctttgggtccagccaaacctagcttcatttcattctgttgtgactgttactaaacttcaccaaaacctcagtttcctcagtgggactcccacctgccactgtgcttagtgcaagcatcccatttagttgtttatggaaactgcttagctgagtgtctagcctagagtacatgtttagtagatggcctttgtatgaggatgatgatagtgttaaagaattttaaaagtggaggggacttaggaaatcacttaattcattctcctatgtttatattcttggagactctgagtttgtgattctcccatagcttgggaaatagctgagccatcatagtctagtattcttcccattaacaacctgaaaagtgagtgtggacgtactcatgtgtgcacgtacagatttcatggtgtctgtaagtgatgacaaaagctttaataactggcacactagcataatatagaaatcaatatatatcaatgtaaaatataacccccttttattctgtaaataaatacacacaagcacatgtatattatcactgtttatagcacaaattatcactctaatttccaattttttaattgatttttggacattctgaagagtattcttgttactagctaaatgatctccatttccgggccatggtttgacatagggaatgccagccaaaccttccagcaacttccccattaaattgattattctggttgggcgtagtggctgacacatgtaatcccagcactttgggaggtcaaggcaggcagatcacttgagctcaggagtttgagaacatggcgaaaccccgttgctgcagaaaatacaaaaattagccaggcatgggtgcaaccctgtagtcccagctactcaggaggtggagttgggaggatcgcttgagcctgggaggcggaggttgcagtgagccaagattgggccactgcactgcacagcctgggcaagagagccacaccctgtctcaaaaaaaaaaaaaaaaaaaaaagaaaaagattatcctaagggccctggcactttattgcagtacaaagagagttgggtgtgctattgccttgtaagagctgtgatggtcttggatgcctatgcttcctatgtggcctgaaacgagaaagcctgactcattggcattacctgctctgtggcctctgcctgccagtgcttagctcccctggagccttccatggatgctacacatgcccctgcttctgctctcttggtctgttgagcagctgtgtccagggccacagctgtagcttataccacgtgccacctagtacataagtattgtaatatatcaaaaaccagtactactgaatctgagtgaacctgaatattagtcctgcaaatagctcacaataagtcctcctaccaggcaccaggtcacgtcaagatgagaagcagaaacttcagagtgataaagaggttcacttctgttaaacatttgttcttctgaactatcaaaagtgaagagtttccatgggccatagcttggatacaccaataggagattcttaccctagggaggcttgctagacacatctccagtctggctttgttaaccctgaaatggaacagcatggctttttttttttttttttttttttctggccaaggctgcgtgagtttgctagaggcagcatttttttgtggctttatcttctatgtgccattctattaatatttctattctacagataaggaaatcaagacttctctagactatatatccagctaatagcagaggtaggatccagatcagttctggctgaactgaagctgacataaagcctgtattttaatacaggttgccttctgtaatgcctaacctcttgtttggcataggggttattgatttgttattttgctaaatgttatctttttttctctgaaattttaatttctagttggattcccagccatttgtgggaggcattccttggaatcatgtactatgagtgctgaatttctaagaattaaaataaaaattctgacaggcatggtggctcataactgtaattccagcactttgggaggctaaggccggccaatcacctgaggttaggagttcgagaccagcctgggaaacatggtgaaaccctgtctctacaaaaaattaactgggtgtggtggtgcatgcctgtaatcccagctactcgggaggctgaggtgggagactcacttgagcccaggaggtggaggttgcagtgagccgagactgcaccactgcactgcagcctagataacagaatgatactctgtctcaaaaataaataaataaataaataaataaaataaaataaaataaatttaaaaaaataaaaatttctggtcattttagaagatctcattacataaaaatcacaatgtcatgcgtgttattatttgatcctgttgatgacatgaggcatgtagaaaagtttttgttcttaattagttccagtttatagggtggggagttggtggggggaaggaggcctagaggagtaaaatgacatactcaaggtcacacagcttttaagcagaaaaaccaactttcaagtctgagacctctcttctcaaagtctgttacatttcctcaaagcttccctggagtgagatgaatggggaatgagacgtaagcagcctttggagccaaagcagtggctttttccatggtatatctacttgttatgcccatacgatccatttctctaactgctgggagccaagatctgaaaaatctgttacaaagaaggatgatgaagccctttgtgataatgacacgagttccttccttgccctttgccaagcactgtgaaggaatggcttttccctagagtggggcatctctacagagtcactttagtttcagggatttctatcccacagttgtcaattttatagaagccaggacaagacatttttaacattgtgactcttaaccactgagaaaaatgcccactggtgaatgggaacatgaatatgacatgattctaatgccaagttcactttatcagtcgtctctccaaaaggctgatcctgaacactatgggatactaactcactttactagacctggatgatgaaaacattctggaaagaggaaaagtgatgttctgtggaagtgtttttgtggagtcccagaggatccactgaagaaggctgatgtcccaagaactgcagttggtgccaagtgttggttgaattcttgagagcaagaactgcagttggtgccaagttgctgcccatctcctccctgtccccagcatattagatcatcttgagtattgatgctggagctgagacagttaccactgtgatgaagctgggtctgaagtcttagaataagtcaaatgtagaaggatgttccttcctggcaagcccctagcctgcttggagtgaggggggcacacaggctcttggagggctgttggcagcatttgcctgcctctcccaggccagctgagaaacttgtgtggctgtgaactgtgatgaatcacgcaagaggaaggaggtctctacagctgttgaggaaggacatatcaaacttgaatagcatagcacttggctctttattttatgtaacatatttttaattgtaaaactaatgaatgtggccgggcacggtggctcatgcctgtaatcccagcacattgggaggccgaggctggcggatcactttaggtcaggacttcaagaccagcctcaccaacatggcgaaaccccatctctactaaaaatacaaaaattagctgggcatggtggcgggcacctgtaatcccagcttatcgggaggccgacgcaggtgaatcacttgaacctgggaggcagaggttgcagtgagctgagatcgcaccactatactctggcctgggcgatagagcgagactcagtctcaaaaaaaaaaaaaaaaaaaaacaaaacctaatgaatgtaacttgcagaaaatttagaaaatataatcataaaaacaaacaaaaatcactcatcattttcccagatataattaaatataattactataactgttttgaaaatgtagtggataaaagcctggactctagaatagcctgcatgggtacaaatcctggcttactaactgtaggacctggggtgaatcactgatatgtctttgcttcagtttccttgtgtataagatgaagatagcaatggtattgccttcatagggtatttgtgaagattaaatgtgttactacatataaagaatttagatcagtggcctagtatgtggtaggcattcagtaggtttcagttgttattattttatgtttattatatcctctgaattgtttctctaaactgagatagttttcttttacaaaagtaagattacacagtggattatgtgttgtagcctgcttattttacatttagcctttgccatgcccttctgtacttttctgcaaaatgattttagtagctaaccatatggcgttattagagatatttaacaattcccttactattgaaaaaaatacatcatttatagcctcttgccatggtaaacactatcttgatgaacgtctctttttggtaagtttttgcataccatccttcttttgatgacagtattttatgggggagcatttcttcttagaggaccagatggaattatccacagcccagggtgccataggcatgtactgaataagcatatgaggggatgatcactatgcattatggacactccttctcctttgataccacttctcacagtgttttgtccacggctaagaaatcaataaaatgtttatgaaaagcagccacacttttttatattttcagttacattaaggcagttaagactagccctagcatttgtgtttatcttctttatataatttctaaatgactattgaatcatctcaaatctcttttggaatgaagctcgatacaaataaatgatcaaacagccaactagcaatctagtgggagacagaaattctctcccaggaaacacaaattttatgtcactcttgacagcaaggactggtcaggttcctacaacttggaaggaataggatactgcgtctagtttcccaaacattaggaatcccaaggaaaacttatttcttacacccttaaagtgactcagaggtaaaagtgcaattctctgatgtttgtccttggtgggcttagattttcacaccacagacatcattgaaacaagaatctacttggagccttagaggcagtcctggacctttctctttggatggcactcacatgctctgtcaactctgatgtcctcaccttcactctcttacaccctcaaatccctgaggacccttagtaagcagagtgttctttccactgggtgccattttagccaaagtatttagaaaggtgttggaggtagcaagctctgcattcctaagaacacaagtggtgttaaccatctgatgcaagggttggaaaactttttctgtaaagggccagagagtaaatgctttagactttgtgggccgtaagatctgtggcactactattttaactctgcattgtagcatgaaagcaaccataggcaagatgtaaacacataagggtactttacttctggacattgaaatttgaccctcataccagtttcatgttatgaaatatcattcttctttctacttttttcaatcatttaaaaatgtaaaagccattgttatttcacagactgtacaaaaacaggccgtggactggatctggcccatgggatccagtttgttaccccttgatctaccgtggtcattgtttgtcttctgcatttctttctcattgcaccattttcttctttgttgtgccatattttgaaacctctctgccctttctcttaactagctgaggctaaaatatttgcagaatctgcacttttggcacttatgtggctcatcagggaaagccagaatatctacctaaaagaaccagtagagcaacatcaaataatgcccctcttcttttttgtgtggccttgccagttcaacgtataatttgaatatatgaaggttacagatggactctggcaagttgttctgatttctgcagcattccaaagctctaatgagcagagcatgcagcctgagggatggtgagagtctgatttttagataatcaaggatatttatatcttttaataggctggtgccttgtagttctattccagcataaaactgagagttgaagagacatctaatcaatttgatgtcctctctttaacagttatatatcaaaggggtgttcaggctgaacacatgaaaatgttacagggatggaaatgggagaattataaacattttatgctgctctatcctcactatatttaaaacaaaaacatgatacagatttttacatggtggggtgtgtttacagggaaataatgtgctctatttcatatgaaacaggacacaagagagcattctcagatttgtaacactagccgtagtctgtggaggtgcccattagacctgttcctggccttttattcagggctgtgaagcagtaggggcgacagaggctcggctgcctgcgtaatgagattgacttggtttgcctggcatgcagtgatttatgagggtgcttattgtagggatatctgccgctgagagcagccagatgaaaggtgtgtgggtgagaggtggaggagagcagggaataggagagaggcagttgtgtataggcaggtaaggctcatcttgattatagttgttggaatcctgagctgagtgaagatgtagaatagtgtgaaatggtagattagcaaggctttggaattgcacagatatgggtttgaattgctgacccttccactcgttaactggactctttggtgagttactttccttctttgagcttccattgcttcatctgtaaactggggataataaccacttccactctcccgctatatgaaactgtactatcataaaggtctgagcacagttcctgttgcattggagagctcagttagtggtagagatgattaatgtttgtccatatgtccattcattgtttgtttaccagtattcaatgtgctttgcaatttctaacagagcctcattttctaatagatgtctaatggtgacttagacatctgttaggtatcaatagctcttaagatcaggatggaagaacatgacagtcaacatgtatttatagatatatgtatgaacatctaagtggcatgtaggagtgtactggtacctgaaatatgattgaaagaacagccacctggccagtaagcacagtaaaagatacttcacctcactagtaatcagggaaattaccaaaataggaccaaagtgagatacttatttatacttgacaaagtggtaaaaatgtaaaagtctgacaatactaagtgttaaggagaatatagagtgaaggaacacatatgtactagttgtaggaatttaaactgctgtgactgctttggagaatggtttgtcaatatctagatatatgaagtgtacataccttatttactggcaaattctgcttgtaggtataatctagagagagtcttatgtatgttatcaaagtcatgtgttcctcactgtgttgcttattataacaaatagcctacgtgtccatcagtggggtaattgatacacacattaattgagctaaagctgcatttggtaccagcataggtgaattttaaacaaaagtaagtgaaaaaaataaagttgcaaaattatgcaaatagaaaaccatttatgtacagcttgaaatcttggaaaataatattaatacattttttgtggatacaaacatatggaatacaagtttgaagaaattaattggaatgacaaatataaaattcaggctgatattaggagaagaaagtgggatgtgattggaagggttgcctggggctcaatctcaactctgctagtaaataaatattcactagcttgtatgcccttagacaagtttcttaacgtctgtgcctcagttttctgatctataacataggaataataatattatctatttcattgggatgctatgaggattaaatgactgaatatagataaaatgcttagaaaaatacctaccagatagtaagtgttatatataagttagcaattatagtgcctattacgtgaatatttttattattctttattttgaaaatcttatatattgcaagttttgaaaaagaatagatgccattcttgtcttttgtcatcatatagttggaaagtgaacaaagattaaaaataccatcaatacaggaatttcaggatgtggcataatagagtttagctacgttctcttgacccctagatttattaggtaccatgccaacagctttatatgcatttatttaatctttccctatggagtaggcacaatttttatccctattttacagatgggaagaaagagatttagaaagactgacttccagggtcacacagctaggggtagcaaagctgggcaggaacccaggtgagaatgactcacgctcttgactgctaggccttaaagccctacctggccactgttcacattaaccacctcctctacacagattcctgcttccttcctgtatcagcctgcataggttaggttgtgctttggttatgaacattcccaaaagatcagcggcttctattaacaaacaggtgtttcttactgtattagtctgttttcacgctgctttaaagaactacctgagactcagcaatttataaagaaaagaagtttaattgattcacagttccacatggctgtagaggcctcaggaaacttacaaccatgacagagggtgaaggggaagcaagtcacatcttacatgatggcaggacagagaaagagagcaaggacggaagtgccacattttaaaaccttcagatctctcactgtcatgagaacagcatggggaaaatccacctccatgatccaatcacttcccaccaggttcctcccctgacccgtggagattacaacttgagacgagatttgagtggggacatagaaccaaaccatattacttactcatgccaaatattcatcaaaggtcacctgggtcatcaaaggtcatatgccacatagctcctttctctgggacccagaagtcatggacagagcagccacagtctccaaccttgctgattgctatggcaaagggagagagaaatacagacagagagagagagagacagagaaagagagaaagagagagagaaaaactatggagaatatcacattgacagttaaatgtaccctggaagtgatgcacaacatacactgtgatacacagcacttcccctcacacacataggctggagcagtggttttcaaccaggggtgattttgcctccactaggggatatttgccaatctctggagacattttttattgtcacaactcagaggtggagtgggggttggggcaggtgctactggcatctagtgaatagaggccaggaatgctactcaacaccttgcagtgcacagggacaaccccctcaaaacacgcacaataaagaagtatttagcctaaaatgtcaatagtgctgagattgagaagccctggactggagctaagcacaaggggccaaaaagcgcaattttaagaagctataaagggaagagaacctgaaatatttgacagatagcactaatagctgccatgcatcctaaggcctaaaagctgtactaaagccccttcagaaggtgtttttcatgatagaagtgaaccagtgctttaagggatagccatggaatggggcttctagtatagtcagcttcatcagagggccgaggagtgccctggactcactgaagttgactactgctcttcctcagcagtctctctggagcagcactgtccaaatgtagtacaataaaggccacatacgtagcttaaaaattttcagtatccacaccaaacaggtaaaaaggagcaggtgaaattgattttacagctataatttctttaattcaatatatttaaattattatttcaacatgtaatcagtataaaaatattgagatactttacattcttttttttttgcaccaagcctttggaatgtgttgtgtgttttatatttactgcacatttcagttgagactagccatatttcaggcgctcaattgttacacatggctagtagcggcaatactggaggtttctgttcctgggactcagtgagggactgacctgggtctcccctgaggaccagtagcaatgctataactcagagtctataagttctgagagtgggacacaatttccaggaatatctgtcccagactcttaaagacagtctgtgtatgttttaagaatgaagagggattggttttccgtggattctctgccatcaccatttttgtttgtttgtttttttttttttttggcaggtgcctcatctccagacatggagcccagctatgggggaggtctctttgacatggtaaaaggaggtgcagggaggctctttagtaacctaaaggacaacttgaaagacaccctcaaagacacatcttctagagtgatacaatctgtgaccaggtacgcacattcttcccagttaatttagtggatccccatgctctcaaaggatctggttacctgctgactgcttgtctggctcaaagagtgtcaattttgggatataattttatgggatctgatgaactgagaaatgtcattgaagacataaagttaagtcctttagaagctataagcacgggctgggaggactcagttcattgccacattagagtataatggttgccctccctgtctttagaatcaaacatcttgggttctaatgcaatatctgcccttgttaactaagagccctcaggcaagttaattaacctctcagagctttttttttataccctgacaggatttgtgtctttgggttgtttagggattaaatgagattaaaatatacatgcaatctgaataagcattacctacggattgtaatcaaatcagacctttgtttttgtttcctactagccctttaacatttattcagtgagagaagtttcctactcttccactgtatgaaaattcttataagcaggtcataggagttattttttattgtttagtattagaaaattctagggtcactttgagttacaatatgcagttcttaatcagaaattcaaacgtcaagtacattatattaatcaaaattttaatctttgttcaaagataaaactattcttacctctgattctcaaccagggcctggtaggcagaaaaatggtgtcatttattttttctcaaccacttcttcccctaccccttagccacttacaattatggaagatatttccaggtaggcaaagaagctagaacaattggtgttgataaataagcagagttttctattctgagattgattcagatcatgaagtggcatctacaagggcattagaatgcaccagttggagtggcatatttatacccctgaggtcacgggctttcttttctcagtgatccttccttgttggagagaagggctggaggggagtcgaaacatgccccctggacagcggtgtcccagttcatatgcgcaagtgattgagagagagaaatcttggcatatttggatcattttaatgagtgcccatttttgtcttgcttttagctacacaaagggagatttagacttcacttatgttacctccagaattattggtaagtttctcatgtttattaacagtcctttggctcagtttcccgttgctgcccatcgttatagcagacgtaaacatttaacctgttttctttctgtgtgatctctctcctagtgatgtcctttcctctggacaatgttgacataggattcaggaatcaggttgatgacattcgaagctttttggattccagacatcttgaccactacacagtatacaatctgtcacctaagtcttatcgaactgccaagtttcacagccgggtaaggatttttagccctgagatcatactgttgaagacgtgatggtgcttttcctcctcagagatacccttaaagcacgtgcccttaggcatctgaagctgaaaaactatacactctggacacttctgttcacaaaatatttattaggctgctatgagatatcctaaagattttccttgggtgaggatacttacaggaaagtgtatctgtcaatgaaataccatcgaagttggggtctcaagtctgttggtgcctggttgttccatggcacagtgttcatgaggcttaagttggagattgaactgctgctagggcagttggctgccttcatgctgttacactaattatgccgttgacccttctttattgctacttggtatcaagataaggcagtgtggatagaccggtactgacaagtattaatgggaacgtgtttccattaatatattttaagaagttttttgaactagagtgagaaatattcctagtttcaccttggcttaggtttgaatctgatatcgagcctgatatttctggccactgaattctgacttactcactaaaaaaaggcatttttttcccctctcaagaacatctctaaatatttttgacttagccttcagatatgattggttctgcaacttcatttgggtctattaataaatagaatggactttctatgcatggatcctttaaaagtgaaacttgatgtcaaatgtgtaaaatgatagctggttgacaatgctgtgtatctaggatcttagctttgatgctggaacacacttcgttccaaattccagttaccattgataatctctgggcctcagtttccagatctgtaacacacacaagaaaattggtgtacatgctttatatggctccttcctgccctaatattcaataagctatgggagagttttaaggacctctttttcagcgtattctgagaacagtctcaaattttggtgtgcatcagaatcacttggagggcttgttaaacacagacttctgattcagaaggacaagggaggcataagaatctgcatttctaacagcttcctgggggctgctcctgatgttgctgcggggaccactctttgataaagcactgataacgccattctgaagtggtttgatctaaattgccattctataatgaagattttaaatgcatctctttaaaatcttctgtaataaaataaccttccaactcttattccatctattagctaattcagaacaagtgaattaacatcaaacaaaaatgtggatagatattttgttcttaatgtaaggcaaatcttttgaattatttttcttgactggaggctaagtcagtgccattattttcataatttaaggactgtggaacatcctacacaatatttcatagaaattttatttgaccttgaaagatctgtgataatctggagcattttccctctgaaagtaaataaagatatgatatcattatagaagcatttatacatataaagatgtctctttgtataatgtttataaaaggcaatctctataaagatgtttttaatgaaaggcatctatcagtgtaactaaagattttgtgactggacttaagggtttaccaaaggaatcagagattacatattaaacacctaccctgggctgctcttacttgccctagaagaggagggagcattttttttttttttttttggatacctagaacaacagttcctgacatagataatcaatgtttttaaaaagcatgaatgtgctgcacccattaactcgtcatttagcattaggtatatctcctaatgctatccctccccaaaaataaaaaataaaaataaaaaagcatgaatgtggaaagaattgttaaacactatagatataaaataaatatttggtttttgttctcaagacacctaagcctagttggcgagagaacccaggacgttctaaagataagtacaaataatatttataatacctgccaagggagattagtaaagggagacaccagtgacagctggaccttagagcaggagaaaggcttatataggtcagaggagtggagtcatttcttgcctatacaaatcataaaatatcttgtgaggctcttgatgatctagcctctatctgctcctctaacttcatcttttaccattcttcattgcccaaaaatcatatgctccaactagggataggcatgtgctcatgtgcacacagacacacacaatcttcttgcatgagctactccttctcccttaaaagctacccatgtcacacacccttcgtctccttccttccttccttcttcccttctctttcctttctccttccgttttccttcccttctccttcccttctccttccttccttccttctttcctcttcttcctcctcttcttcttcttcttcttctcctccttctccttcttctccttctcctcctcctcattcttcttctcccttcctccttccttcctctctcccttcctcccttcctcctcctcttcctcctccttcttcttcctcttcttcttcttcttcttccccctcccctcccctcccttctcttcccctccccctccccttcccttcccttcccttccaaaagagcctcactcagttgcccaggctggagtacagtggcatgatcttggctcactgcaaccttcgcctcctgggttctgattcttgtacctcagtcacccaagtagctgggattacagatgtgtgccactatgcccagctaatttttgtatatttagtagagacgattttgccatcttggccaggctggtcttgaactcctggccttaagtgatccacctgcctcagcctcccaaagtgctgggattataggtgtgagccaccacccccagcccatcttcttctttatttgcctaattttgctaaggagaagatttccacatgccacgaggcttttccaattctctctcctaaaacacaggattgcactacatctttagctcttccagatagtcctagaatttggcagaatgcaagtggatcctctgacctgtctcctttacccttagttgcatcttagggaggcagtcccaaagccgtagtatttccatcttacctttgtttttgatttgcctacatctcttttcaaactcctagacctttctttccccagcactaacactgtgaatggatttgcatctcattgttgcatgacttagaaaagttttctttgtttttacctttcagttcatgaggactagaaccatttcttactccttccggttctgtggagtgctacgtctgaaattaaaccttattttaataaatgttgatggtagagtctaccataaatactaaacatggaactggttttatttgtagattcataagggtgtataaggtcttaggaattttttatttataaactcgtgggagtctggatatgcccacatcatatacctctgtgccttgaaacctgaattcagtcattttacatgatgattatgtgattgtttgtatatgttcaaacctgcatttgaggatgtaggtagtgatgttggcaaagacaggctgtttccaggaagattttactttgctgagggttgtcattctgtatttcgattcacttttatgcttagaagccacattggttgacaggaattgtatgaaatgatcaatactgttttcctgatttttctattatatatttgcatatgtcacagaatgttaaaataggactttgtttagtctcagtttagcagaggctacaactcaaaacaatgcatagcacatagcccagcattcaaaagcgaagtactggaatacctattcaggactgcaaaggatgtatgaaacctcaggtgtttttatttttttttaatgttttttgactctttatagccaatatccaccttgaggaaataagagtactgatgctgacaatgaagtcctggagaccaacaagatgcatcagttaaaccagatgttcataatgactcctctgtgtatgtagatctattgctaggcttcagagagcttaaccatctgtttccgctcctttaaaaaaattattgtggtaaaatatacataacataaacttattgtaaccatttgtagcataaaatttcagtggcattaattatattcccaatgttgcataaccaacaccgctatctatacttaaacctttctcatcatccccaacataaacactgttcccatccactccatgcatatgtgtgtgtatgcgtgtatacactggtttggtttctgcatagaaggtttatagctgtgccccagaatatcaggaacctttacacatttcttggcattactgttggcaataaatggaaagctggatgaatgtacaccaagtctaacctgactccagagttcttaagttctgattaatgctattctagggccactttgtctctccttcttccactgtttacccaggaaggacagtatggtgacagagtccttctagcagcaaagaaatctgcagcccagctggttgttttaggctctaccctcttaactatttctaaatgacataatcttctaggatttctttccctttgggaacaatttgatttttggaaaatgtattatcaacttgggtgtcttaaaggactcatgattgaaggtcaatgtttttacccctttttcttcctgagcacaccaaagaggttgctacagctcccagttgtttctgcattggtgggaggttggtgggagattggctggagtgggggaagtttatagctcatatttcatctctcactctgctaccatgcctcagtgtcaggacaagaaataactggagtgaaaaaaacaatccctggcctgggggccagaggaccagagactcccacattctagttatgaagccttccatgaattgaatgtcttaaccctggtaaaatacagccatcacttgaagctgtaaccactctacaaatgcaaggtggagttattgttatcagtcatcagacaatgtagtataatggagagtgcacaaattttatttttttaaactgagatgaggccatatagtgtatacaaactttagactttaaaaattaccctaggttcacatctcagctgttcttcttcctgggcaagtcacttttacctctccttggactcgtttttctcctgtgtaaaatggatatgccaataagagagtgcctatctcacaagcactcttagaattttttttataggtttgttgtaaggaataaatttgatagcagtgtcttgcttagagtcatcatgcagtaagtagtagctatgattaacattggtaataataaaatgctacaataagtgattgactgaattatccccatcctccaaaaatggtgtgtgattcataaaacactagatgtagcaattaagtcatactctctgtagaagcgttcattcctatgcttagtgaatggctgcttctgcccatcctgtcttgggcaagggatgatggagagatgaaaattgaatggcatccagctctagcgatgatttggcctctttttcccactgggtggtatcatggcagtgctgtaatctgtatggtgtcctctgatgctaagcaagcccaggagatgttcaaggtgttcaggaaaactggcgacagcattgcgaagtgtcagctactgcatgaagctgtgaaccccagagagctacaaaaatagcttgcagtgattgaattccttttttattttgttggttttgtttatgccttagtgttttccccttttagacagagcacatgcttttaaaaaattctaattgtatgtttacttaatggtgtataattatatatcaagtaaatatataattatggagtactttaaattaatattatttacttgattgagttaatgattctggagctattagcctattgtgctaagaataatttagccaacttttagctgagactcattacagatattgacatttggggtgtgtgtgtgtgtgtgtgtgtgtgtgtgtgtgtgtgtcatagccagtttttaaaaccttcaaaaatattgctggggaaataaattttctatactttcattctgttacagtctaaaaaaaacccaataaaatgggttcacctgttccctcctcaagatatggtacatgtggacaaatcttattataaaaatagattgccaaatggggttcattcctttattctttcactcattcattcactcagcaaatacctgctgagcacctaccatatgagcaacacatgcacagtggacactggggttacaaaaatgagtaagttatggtctctcttctcatggagcttggtgtctacaaggggagacaggtataagcagtttattcagtacagcttgaccacaagctagcatttactgtgtttatgttgtgctacttaattctgacaacaatcttgtaatgctcatttatactttacacactagataattgaggcctggagaggttagtaaattgcctaaggttaatcaagtagtaagtggtaaatccagagtgaaaatccagcctgtggatttaaccatgttgttctactgaaaaaagctgtaatagatgaaaataaactggggcatgagtataaagatgactaagcgtttctgtctgtgagtattagagaaacagtcagagccaagagaacacttgaacatttttttcttttttaaaaatttgagttaaaatatgcatatataatgtaccatttttaccattttaagtgtacagtttaattacatttgtattattttttcctccttcaaaccctctcccactcctcttcctggcctctggtaactactaatctactctttatcttcatgagatccacatttttagtttctgcatatgagtaaaaaacatgcaatatttatctttctatgcttgggttatttcagttataatggcctccagttccatccatgttgctgcaaatgacaggatttcattcttttttatgtgaataatatttcattgtatatgtataccacattttatttattcattcatccattggtaggcacttaggttgattccatattttggctattgtgaatagtgctgcaataaacatgggagtgcagctttatattcgatatattgatttcctttcttttggatatatacccagtagtggaattgctgggtcatatggaaccttcatactgtcctctatggtgattgtactaatttaccttcccacctacattgtataagagttcccttttctcacattttcaccagcatctggtattacctgcctttttgatacaaactattttaactgaagtgagatgacactatattgtgattttgatttgcatttctctgattagtgatgttggacattttttcatataactgtatgccatttctatgtcttctttggaagatctgttaattctcttcaactcttttgcccagtttttaatttgttttttttttttattgttgagttgtttgagctccttatatattctggttattaatttcttgtcaaatgaatagttcacaagtatttcctgccattcagtgggttgtctcttcacttcgttgattgtttgctttgctttgcagaagctgtttagcttcatatagtcccaattgtgtatttttgctttggttgtgtgtgcttttgaggtcttccacaagaaatttttgtccagatcaatgtcctggaacatttctctaatgttttcttctagtcattttatatttttgggttttggattcaagtttttaatcaattttatttgatttttatatatagttagagatataggtctattttcatttttctgcatatagttacccacttttcccagcaccatctatggaaaagactgtcctctcccactgtaagttcttagaatctttgtcaaagatgaattggtggtaaatgcgtggacttatatctgggttctctattttgttccattagtccatgtgcctgtttttatgccagtaccatgctgttttggttacggtagctttgtaaaaaactttgaagtcagatgatgtgatgcctctaactttgttctttttgctcagggtggctttggctatttggagtcttttgtggttccacatacattttaggggtttttttttatttctgtgaagaatgtcattggcattttgatagagattgcattgaatctgtacattgctttgggtagtattgccattttaacaatattatttcttctaatccatgagcatggaatacctttcctttttttgtgtcctcttctatttctttcatcagagttttacagttcttcttgtgtagatctttcacttctttggttagattgattcccaggtattttatattttttgtagctattggaaatggcattggttccttgatttctttttcagattgttggctgttagtaaatatgaatgctgttgatttatgcatgttggttttgtattctgcaactttactgaattcgtttgtcagttctaacagtttttttggtggagtgtttaggtttttctagccataagatcatgttgagttcgaacaagggtaatttgacttcttcctttccaatttagatgtcctttatttctttttttgcctaattgctctggccaggacttccagtattatgttgaataatagtggcgaaagtgggtatcgttgttgtgttccattctttagaggaaaggccttcaattttcctccattcagtacgatgttagccatggatttgtcatagatggccattattattttgaggtatgttccttctgtatctattttctgaggatttttttttttttgagacggagttttgctgtcacccaggctggagtgcagtgatcttgactcactgcaacctccgcctcctggattcaagcagttctcctgcctcagcctcccaagtagctgggattacaggcacctaccactatgcccggttaatttttgtatttttggtagagacggggtttcaccatgttggccatggctggtctcaaactcatgacctcaagtcatctgcctgtctcagcctcccaaagtgctgggattataggcgtgagctgccgagcctggcctcatgaggatttttatcataaagggatgttgaattttatcacatactttttcagcatctattgaaataatcacgtattttttgttcttgattctattcatgtggtatataacatttattgatttgcatatattgagccatccttgtaccaatgaagtaaaacttttttttttttttttggagacggagtctcgctctgtcacccaggctggagtgcagttgtgcgatctcggctcactgcaagctccgcctcatgggttcacgccattcttctgcgtcagcctcccgagtaactcggactacaggcacctgccaccacgcccggctaatttttttgtatttttagtagagacgggatttcactgtgttagccaggatggtctcgatctcctgacctcgtgatccgcctgcctcagcctcctgaagtgctgggattacaggcgtgagccaccatgcctggccatgaagtgaatctttgttgataatggtgaatgatctatttaatgtgttgttgcatttgttttgcaagtatttggttgaggatttttgtatctgtgttcttcagtgacactggcttgtagttttccttctttgttgtatccttctctagttttagtatcaggtaatgctggctttgtagaatgagttcgaaagtatttcctcttcttccatttttaaaaaatagtttgagtaggattaatattcattcttttttaaatatttggtagaatacagcagtgaatccgtcaggacctgggcctttctttgataggagaatttttatacagcctcaatctcattacttgttactggtttgttgaggttttctatttcttcatggttcaatcttggtaggttgtatgtgtccaggcatttatccatttcttctaagttttctgatttgtttggtatataattgttcatagtagccgtctcttatgagtctttgtatttctgaggtctcagttgttaggtctcctttttcattcctggctttatttatttgggtcttctctctctttttcttagcttacctagaggtttattgattttgtatattgtttcaaaaaaaacaaccttttattttgtcgaaatttttttctttttagtttcaattttcttaatttttgctctggtctttattatttctttccttctagtaattttggctttagtttgttcttgcttttccagttccttgaggtgtattgttaggttgttaatttgaagtctttctactttttcgatataggtgtttattgctataaactttcctcttagtacttcttttgctgtatcccatatgtttttgtatatttccattttaatttgtttcaagaaatttttaaatttccttcctaatttcttcattgactcattggttgtttaatttccatgtgtttatgtattttccaagtttccttttgttatttagttgtaaagttttattccattgtggtcagagaagatgcttggtatgatttctattttatttatttatttatttattttatttatttatttttttgagacgaagtcttgcactgttgcctgggctagagtgcaatggcgtgatctcagttcactgcaacctccacctcccaggttcaagtgattctcctgcctcagcctcctgagtagctgggattactggcgcctggcaccatgcccagctaattttttgtgtttttagtagagtttcactgtgttggccaggctggtcttgaactcctgacctcgtgatctgcctgcctaggcctcccaaagtgttgggattacaggcgtgagccaccgcacctggccaatttctgtgtttttgaatttgtacagactcgttttgtggactatggtctattctagaaaatgttccatgtgctaatgaaaagaatataaattctgcagcagttgggtaaaatattcagtaaatgtcaataaggcctattagatcttgaacctgggttttaaaagatgaattggagtttaccaagagaagaaaatacattgcagacagaaaggagcttgtacaaatgtacattttatgattcctctgacagcaaaatgtatcttcccagttattctgtatttttagtcagtaagtcatttccgttccttgaaaacaaacacgtcaatggggaatatatatgtgggtaaagactagaccagaaacagtcctgaatcatgttgggtaaaaggggcaaggcatcataaagtttaaattgacagaggccaatgctagatcaccctggactgtttgggagctatgccaaacatttcaaatactttgtttaataaaccatacttgtctctcctaaaggtatatgaaagtgggtaacctggaaggtctcctgacatttgccccacagtcatcttgtagaaaaaagttacaaattaacaaaaaagaatgggctttcttggcagccccagacagagaaactcaatgtgtttgcttttagacgtcagctctaccaagagcacagataatttcctagtcgtattttgattatttattatctgattaccagaaaagggctaatcaaacaaattcctcctgcctccctttcccatggtcaaatagaaggaattcgagacatttgggattgcagagcacattctgacatcatctgtatgaagcctcttctttctgcagaattccgtatctcaggaaatagcacttcttgtatccttctatccagccattcaagctggaaacctggagttcaggcttgactctttcctctccctcccctgacacactcttcagtacacccctccacatgcacacactgccaccatgtatcacctgtcttatgtccaggtgtcccaccacctctctatctcctgagtccctcaagtgtgtttgtaccccactgctactcagctagccttagccactatcatcccttattgacactcctcaccaacctcctgactggtcttcctacctttaggctcttgttatccatttctgttctccatactggagcctgaaagatctttggaaatgtagatctgagagtcattctccttcttaaatattctcccagctccttaacaagactgtatgatctggcccttcagtctacactctcaccatgaaggacttcatttttttcaaacatggccagtcctgactgcagggctttgcactggcagttacccgataaaatgataataattgccaacatttattatcactctgggtgtgtcagatactgagctaagctcttgaagtacatgttcatgtagtatcctgtgagttatgtaagaggtactgttcaccacattttatgaagaaaggcttaaagaggttatgaagtttgtccaactctaagcttctccttgttgtttcttagctagattagtaaatatgtaatcaactggggatcatgccttaacagtattttgaggcaagtgataatgtcagccagtgtgctgttgtaacatgatttatattcagaagatctgggctgcagtgctgacgctgagcagcagtgtgactctggataacctctgagagtcagttttctcatctgcaaaatggggtttatattaatacctgtcttagatgattgttgcatggatcagagccaagcaatattcctataacttagttgatgatccataatgtgtgaaaaaaatatgcatgttaaatgaatgaaaatgccaagggtttcccctgtaagttgtgtcctttgattaaaagagaaaaaaaatagatccatgcacaagcctgcctttggctcactctatagcacttttcatgttatcacgagagctgggataaattagagatggtgcaggacttataaccctataattaaacatttggggggaggtcaaaacattttatgcttaatagaaatgaaattctatgtaacctcacagaatagaaaaaaatccaaggatgtatttgaaatggtctagtttaatttaaaatgtgcttcaaaatgtgttttcatacctttactgaatgagaattctttaatttaaaaaattgctgtgttaaacaccctcttcttcatgcatttggaccctgttcccactattcctatctatattaagagaggatgtggtatcacttccagaagatgttggttggtgtgataacctgcttatgaagaggaagttgctggaggaattaatttccttttgctgtgctcccttaggtctcagaatgcagttggcccattaggcaggctcccagtctgcacaacctttttgctgtgtgtcggaatatgtataactggctactgcagaatcccaaaaatgtctgtgttgtccactgcttggtgagtaaccttttgttgttggtggtgatggtttggtttggtcaaatatggatgagcctgtacacaatggtagacaggtaacatttgagttcaataggatttactgagcccatatttaggaattgggtaatgtgagagttgtaaaaataagaaagggatttattattcttgacttaaagcttgactactagtgggaaaggcagatgtatacacaactcacatagtgtggggactctagcatgtgctaagtattataaaggaggtagaaacaggagtagtgtgtgcacagctaaaaatgccattgacttttgtgtgaataaagttaacattaacatattggcgtatttattttttcttcctgtttgtgtttgaataaaaataaaagaaaaaagatacctatgtccttgtaagaagtcacatagattgactgtattttagagcattcccagtgagactaatggtttttctgaccattgacttcctagagttcctttccctaactcttctcagaactcttgcctgtcctttacaactcaactttcagtaaaatccttctgactcttgagtattttcacaatacagacattcccattatatctaaatgtcttctgtggcttttaatactctgtgtcatagtaagctcttctcctgcatattttcccactagactattataatcttgcaggaaagaaccatgcctttttttaaacttttgtactgcaggcataaaaggcttcaataagtgattgaatacacaaatggaatctgagcattaatgctggaaatttcaaagcttctataaattttaaagcttctataaactttagtgtatatgtttttgctgtagtattacttgatgattcccaaccccctgtcctttcttgagagccagttggctaaaacaggaaagaaagttgaagaacattttttctttctttttacttcacatctccaaactcttggcaataaagggataacacttggtgtttgtaagaatttaatgttaaagaccaaaggattttcctttccaaggcacagcagatggtgtaacagaacagattacttttagggactaagcaaccttaaggaccttggtgattttctctttactcaagaatttgctgtaagttcagagagcctacatctgacaacttgatggaggaaagatggctcaatggagaccagaaactcccagttctagtgattcttcataaagaataaaaacccaatgaagaagaaaaaagaagaggcaaacaaaagattatggttctacagggtgctcaataagctcactcaaaaaggacatgcatatgttggaaatgaataccatgtctttgggaaatggaattgaagctgggggagggagttttttttgttttgttttttgttttgtttttttttttttttttttttgggaccgagtcttgctctgttgccaggctggagtgcagtggcacaatctcggctcactgcaacctctgcctcccaggttcgagtgattctcctgcctcagcctcccgagtagctgggactacaggcacgcaccaccacacccagannnnnnnnnnnnnnnnnnnnnnnnnnnnnnnnnnnnnnnnnnnnnnnnnnnnnnnnnnnnnnnnnnnnnnnnnnnnnnataccactggttattatattaaaaataataagcatagtggggcgtggtggctcatgcctataattccagcactttgggagaccgaggcaggtggatcacttgaggtcaggagtttgagaccagcctggccaacatggtgaaaccccatctctaccaaaaatgtaaaaagttagccaggtgtggtgctgtgcgcctgtaattccagctactggggaggctgaggcaggagaattgcttgaacctgggaggcggagattgcagtgggctgagatcgtgccagtgcactccagtctgggcaacagagtaggattccctctcaaaaaaaaaaaaaatgataataacaataggctatactagtcttttaataaaaaaccaaagtttttaaaagacctgcatcacaggtaaaaagagaggctacatatccaagagccatggatctgtgaaaagagtgtcaggaaggctaaattctgaaaataaatcagattaagaaaaatatcctttttttaaaactgtgtttggaataagaacaacaacaatttcttgaagcatgtggtataatcttaactcctttattctgttttctttatcagagggaacaaatgtcaaactaggaagaacgtaacaatgatgtttaagacaaagctggtaggtagcaagatagtacgagagcctcacaatcctccaaattaattcactctcaaggcttaaattatgtgacacaataccgaaagcacttggagaagcaattatggatttcatttgtaatatgaagaaacaggaaggagaggtgccaggcaaatgaagagaggagattttttcccaaagtatggaaggaggttgatcctggaaagttgtaggcttgtgaacctggtggtaattcaaggcacaattctgagaaagttttgcacagaagattttaaactcttagcaaaaaaggaatctccattggtttgttatgagcacatatcaaaccaacagaacatttcacatgactaatagactagttgagatagtttattggagtcctgcaagatatttcttagttttttctagtcaagattgagaaatttggctaggttgttatatatttagttgagttgaggctgaatatctgcttccaaaggtaggtgattaatggatcacctttctcctgggagaaggctttatttagttattcattttaatcaacaactttgatgaagatgtggaaattcagcttatcaattttcttagaattataagggtcacatagtgaatttggattttaaaagttcttgtaggttggtcacttaacaaaaattaataatatgaaattaaatacaagataaatgtaaagtcctgaattctggttttaaaaaattaaacatatttgcacattaccttaacatgtcatctggaaaaaatctaggggttttagtggatagagagaataataaaagcttatgttgttacttagcctacatttatactagcttgggctggggttatgttaataaaagcatagtgtccagaataaagaagatgatatttcttctctagtttggtcagaatatatctcatatctttcatttcacatctgggcagcatttaaggttgtcattttaaaacttgaatttgtttagaagaaatgtgctaaatgatgatgtctcttaaaatggaaaatcaagtgaggaagaatagaagggattgagtttgttttaaaagggaagtagaagcattgatagaaagggagggtatttcagatatgtgaaggactgccataggaagaaaggagtaggtttattttttgttctcacaaaaggatgagggtcatttagtggaagctatggaggaatgaaagtcaactcaacatattcagtataaggaagagctctgtaaactggaatgggctacttcaagtatgagtaatctccctgtcacttaaagtgttctagaagaagctaggtcacatctgtcagggatgttactgaattttgtcttaattagcttgagctgctgtaacaaatataccatagaccgggtggcttaaacaacaggaatgtagttctggaggctggaaagtccaagatcaaggtgactgcagttcttttctttctttttttcttttcgaagagttggggtttcaccatgttgcccaggctggtctcgacctcctgagcttaggcaatctgctcgccttggcctctcaaagtgctgggattacagacatgagccactgtgcccaaccaaggtgcctgcacttgtaatgtctggtgagggcctgcttctggggtggcagatggctgtcttcttgtttttcacattggccaagggcagagggagttgacagcaagctcttttgtctgttcttataagggcacaattcccattcatgagatctccactctccctacctcattacctccccaaagctccacctcctaataccatcacattggggttaggatttcagcatatgaattctggggcatacaaacattcagtccacaacagatttatttctacattgaatgaagttgaatctggtgaaggttctttattttatacgaatctaggaacatactttgcatgagatacatatatgccatatcccaacaagcagcatttacctaacctgtgagctcgttacttccagtcctaaaccaagagacttcaactattaattcaacaagtccaaaattactttgaagattatattatttttcaccaaatatatacaaatcaaattgggcttctcagattagaatcaattttattctaaggataagtctttccttgctgcctttgatttaaaaagctgaaacaaattttggttttcaagtgaataatttttaaatgaaaagcacccacagttaagaggatttctcctctctctgtctcttaattgcaaattctgccattttcaatggagaatggctgatttgatcatgttcataatgattttatgcattttctttgacaggatggacgggcggcatcatcaattctggttggtgctatgttcattttctgtaatctctactctactcctggcccagccattcgattgctatatgcaaagcgaccaggaattggactttcaccatcccataggaggtaaagtaagctagatgcaggctaggcacagatgtagtctaattggtatcatgtactgttttaaatctgccttacaaatcctttcataagtttcttttactttatctctgtattagtccattttaatattgctatgaagaactacttgagactgggtaatttataaagaaaaagagtttcaatggattcacagttccacatggctggggaagcctcacaatcatggtggaaggggaaggaggagcaaaggcacatcttacatggtggcggggaagagagcgtgtgcagggaaactgccctttatgaaaccatcagatctcatgagacttattcactatcatgagaacagcatgggaaaacccgcccccatgattcaattacctcccaccggatccctcccacaacacgttggggattatgggagctacaattcaagatgagatttggatggggacatagccaaaccacatcaatctgacattatcctgaactatgcaaaaactgaattggattaggatattagattgtcattcagtttgtaagcccccatacgaaaatttatgatgttaaaactagaaggaaactttaaagaatacttatatccaacttccctcattttacaggtgaggaaactgggactcaagacaggttgtgatttgcctcaggtctaatgcccagtggacagagccagaacagcattcttgatcccaagctctaagaccagtccctttttgttttattatacaggtctttattgaaaaacagcagtagctggttatacttatcactggtgatcctcctgtgggaaacctgatttaacaaagggaaatgcaaaaatacatagagaataaagcgttttaaaattcactttttcatgtaactctgatatagaaataaaagattacaaaagataatctgaaaaatggaataaaaaagaaaactgtttttagataacattcatttttcttttatcacaatttcttcatttttttaaaaactacatctccttaattttttggattaaaagtgcttctgatgataaaattctaaaatttatccaaagccaaattttagctgataaattggatctgctagataaaataggaatagatgttcaaatattgaagtactataaaattcccataagctttttgatttaataaataccccagtatcagttcattggggaagtacagcaatctcagtagataaaatgtttcctaaattattgatcgcattatcttttgctagttaatatttaagaaattgatagaataagtttttattataacagtaatttgcaagaagaatcttcatagcaaatattgattgcttgcttctcctgatgtgatgggccccaagagagtgccaaccttctgtttcagatacctgggctatatgtgtgacctactggcagacaagccctaccgccctcacttcaagcctctcacaattaagtcgatcactgtcagtccaataccctttttcaacaaacagaggaatggatgtcgcccttactgtgatgtactcattggagaaaccaaaatatattcgacttgcacagattttgaacgaatgaagtaagtcatgatactttacttcttcctatgtacttctcaattctcatgtaaatgagcaggaatgagttgaatcatattcttcctgcaagactatatcattgtgaaatagctgatatataaaaaatgttcaacatcagtggtaatcatagaaaagtacaagtaaatcaggagatgttatggccctttttcaaatgaaaccatgatataggctaagggactagcataagctgtatacaggattaagaccaaggggaacatgggacacctggtcattgaagaaggagatggccttgatgggattaggtgagggtaatggaagaatcactgatgaatgaggtttctaagtgagcaactaggtagacggtgatgtaattaaagaagttacagaatccataataaagagcaggtgccagtgggtggtcataggggatgtggagagaagggagtgggtggtaacataacatgaaattagtttggaatagattgaatttgaggactggcatccaagactttcacagagcaagacatttctgtttgtatcctgatctccagtggattttttgttccctttatctctgcttttagtattaatttaaagttaagaaaaggcaaatacatgggggctagatgcatttgaggaaaatgagatctgcaaagcaggcatgggcaattgcagtccagatgggatgcagagagggggcctggcattagaccagcaccatcctactgcacaaccagttggcactggctgcactcctgtttttgctcaagataggaaatagtttctgggtccgggcctgggcgaacagtcctctgggccagagccatagagaactatacctgtgtctgtgtgattgtaccagattggactctctttcaatgtatattttggtctgtgtttacagagaatatcgtgtccaagatggaaaaatcttcattcccttgaacatcactgtgcaaggagacgtggttgtttccatgtatcacttgaggtcaaccattgggagccggctacaggctaaggtatggtttttggaagaatcatggcataagttcatctgagtcttcaataggagtatttctgaatcttttctccccatcactttgggcttgagtcacttgtagttttagaatgaaaaagagcgtttaaagattgcttagctcacctccttcatcttacaggggaggaactgagactcaaagaggttgtgacttgcccaaagtccttggcatgatgtccgtgccagaggatgacagccctggaactcttagcaaaccatactctttagaagcctgtgcttttcttatagtgccccatttggatcagtgtaagggaagagatttctactgaggatgtggaattaagggattgtattttttcaattttaaaaaattgagataaaaccacataacataaaagtcacccttttaaagtgtacaatgcagttgtttttagtctattcaaaaggttgtgcaaacatcaccactaattccagaacattttcatcactcacaaaagataccctgtacctatagcagtcacttcctattccctctcctccatctcctggtaaccactgatctacattctgcctctatggatttgcctatttgggacattttatttaatggaatcatacaatatgtggccttttgaggcttccttctctcacttagaatgtttttgaagcttattgtgttatagcatgtgtcagtacttcattatcttatatggccaaatattattccattgtaatgtcacaatgtattaatcttagttgataatctcagttaataatcatcagttggtgaacatttgggatattgccattttttgctattaggaataatgtggcaagtaattgtgttttgattcatcacatattggctaagtgagtgctttgtgccagccattgctgaggtttttaggattgacaagagtaagactatgtctctgcctttaagggactcaatttcacaagggaaatccatgcaagtacaaatatgcatgataccatattagagggaggatgaggtgttataatgggagcagtttgttttagccagcagtggcctagaaaggctacagagagaatatgaacttttaagacatgccctaaaggatgagttcattgggttggaacagggcatcctgggtagaaggaatgcaatgagtcgaagtatgcctgtgtgcaagaacatagtatttagcggatgagaaaatggtttgccaaggcagagttcaagtagaggagaggctggaaatgaagctgagcctattctaactggggaggtcatttaatatccatagtaaacacaaattcagatattgaaacagttgaaggtgcatgtctccccaaaatctaatcttttgatcagattcccttttcgctgattgattgtaatgtgcttctctcatgtatttttaggtgaccaacacacagatattccagcttcagtttcacactggattcataccactggacacaacagttttaaagttcaccaagtaagtactggttgggccaaaagtctatttgaatcaaattagctgtgaagtgctgaggctcaatggcaccaggctgtagcataccctggaatcctgtgctgctgaactactgagtgtcactcagtagcacagagaggctgtgggcattctaaagctttcagttgaatatgatttatcttcagaagtacaaagggaccaaagacttcaaacagaaagttctaaaattctatgtgagggaataagggtaaacaaagcgggacaaagtatcactgcttttgatcctttgcatctgtgtatccccttgtgttttccagtggggatggcagtttaatcagtggtatggtatcagcaatgatgcatcagaatagaagccctgctatagcactgaagcaggcttctggaggacctttctgcaccgacattaacctatctcatagtgtggtctaggtgaacgcaggtgtgggggtggctagagccgggatggagttgctggggccaggataggagtagatgttcaagggctcaggacagtggctgtgggcctattgcactattttaataatggattttgccgtgccagtcacatcagccctgctttccagaatgcttttacatgcagtagcattcaaatttgttgagcaggcattattctcctcttttctctagattaggaaactgaagctcagaaaagtaaagtaacttatctggttatgactgagtcttttttagaaatgagacttagatttaacctaagagtcaacctaagatgacttctgtgccaaacatcataccagttccattgtttttcactgaatttatcttttttaaatccctatttaggcctgagttagatgcatgtgatgtaccagaaaaatatcctcagctatttcaggtgacactggatgtagaactacagccccatgacaaagtaatagacttaactccaccatgggaacattactgcacaaaagatgtcaatcccagcatcctcttctcttctcaccaggaacatcaagatacgctggccttaggaggtatgagtcacctgatggttttgtttttcaggatgaagcctctctgttatttatttcctgtgtctcattgatgctacatggtctttttgtcttgcaggacaggctccaatagatatccctccagacaaccccaggcattacggacaaagtggtttctttgcctctctctgttggcaaggtatttacaagtgtttctttaagtcacatggtttgatgattatgtatttcttctgtaaagatgttggccctagaagcagactacattaaagcagcacttagaggtcattcaatccaggcacacggactcccacctgtaagcccagcactttggaaggccaggataggaaggccaggagttcaagaccagctcaggcaatatagtgagaccctatctcaacaaaaaattttaaaaaattaggtgggagtggtggcaaatgcctgtagtcctagctatgtcagaggctaaggcaggaagactgcttgagcccaggagttcaaggttgcagtgagctatgattgcgccactgcactgcattctgggtgacagagcaaaactccatctctaaaaaattttttaaaagacatcattcaagtttacatccttccaattcattcccttttcaaatcaggcaacttccctactttcaactcagtagatgctcttagactgatgcaaaaggccattttaaactgaattctcccttctctctgctgtgtttttggtcacgtcattcctggactgacaaataagtgtgatttgtttatgatctccctttagactgctgcctctgtaatgagattaacacaggattctatcttccgctgtcaactaaatattataaaaatatcaaatcagcattccccccagggagccttaaccactagcagggcagaactgagcttaccctgctgcagagaaagcaaacacttggcctgtatatctctgctcttgctttaacagccataccagaaataagggctcgattactaggttcttttctctcaaacctggagatattttcagaatcctcctcaatataacacttccagctgctgccagcagtagcctgacgttggcatcctaatcaatacccattggctatccttgctttagagctggctgaggctaactgtgagattcagtgtagaagtgggtagtcagtgtttgggtatgaaaggcatgggaaactggctatggtatggtttatctgaaattatcctgattgaccttcctctgttgtgtgaatgtaagataatattcccatcgcctgcaggcttcagtttgatgaaaaagttgttcataaaattcctttgaattgaaagactcactttcagaattttctttcgagaaatggaactagcaaatcctcaaatttggaaaacccagtggtatctggacagtaggtagatttcttatcccctgttggcctttcttacctcttattttcctcacagcgagggcttttaatacaacttcactctttcctctccactgtcattttagcaaataatttagaggataattcctgtagactctgaaataggttttagtatagatgcacagtctcttgtctgaacctctcagagccaggtatgtttaggaatgcagaactttttggattttagaaggatgatatgctacataaactgatgtaacttgacatcccaagtgatatctcagataataacctataatcaaacatattaatatttctgcagtagaacatataaacaatagccctaagtgagataaatgaagactataagtatcttcatattcacgtctgtcagttttccaccaactgaattcatgccaaacttaggaaaatcttttccttttcatagcttattacattttataatttggaataaaggatgtggatccatacttgacttggaatgtgggtctatctggcattaaatatcaaatttttgtgggaagatctatctcagggagggcttagaaggtcactccttccccagaggaggcctctttcctgctgctcattttgtgctgacagtacccctttcaagctggtataaggacctttcacagcagagctcttcttttcactttttaaatgtgtggttcacttctgctccagactgttagagaagggatttgcttttggctacaggacacatggagaagtaaagacagtgagaagtgtcagcaaatgactagcagataatggtttgtactaccctccccggccaaagcacctagcatagtgcctgaaaaaaaaaatcaacacttaggtactacttactgttgattggagtgatttataatatcatctcatgtatttctcacagtagcctgtgcgttaggtactatttatttatttagagacagtttcactctgtagcccaggctggagtacaatggcatgatcttggctcattgcaacctctacctcccgggttcaagcaattctcatgcctcagcctcccgagtagctgggattacaggcacacgccaccatgtgcagctaatttttgtattattagtagagatggggttttcaccatgttggccaagctggtttcaaactccttacctcaagtgatcctatctcagcctcctaaagtgctgggattacaggtgtgaaccaccacgcccggccgttaggtacaatttgttatccccactttgctgaggaggaaaccaaggcacagagaagtaaagtaacttgcccagtgtcatagagccagtgagtagtgaagctgagattcagtcctaggctggctccagagttcctgctccttacccctatgctctactgcctctcagatgctcaacaagtggtagttgaatgtaacgtgaaatacatcaagtgttccactgattagggtctaaaaacactgtttgctcagggctgaatccttctgtctttctggaattatatacatatattataacaaaaaccaacaatgctgtggtcagcaactaatcccttatggtatactggccttcctcagatcagaaatcggagaagtcattctgtgaggaagaccacgctgccctagtgaatcaggaaagtgagcaatcagatgatgaacttctgacactttccagtccgcatggcaatgccaatggtgacaagcctcatggagtcaagaagcccagcaaaaagcagcaggagccagcagcccctccaccccctgaggatgtggaccttttgggcctggaagggtctgcaatgagtaacagcttctctccgccagcggctcctcccaccaattctgaactactgagtgacctgtttgggggtggaggtgcagctggtcccacccaggctggacagtcaggagtggaagatgtgtttcatcctagtggacctgcgtctacccagtcaacaccacgccgctctgccacctccacctctgcgtctccaaccctaagagtgggagaaggtaattttttctatgttgcactgtgcctctcagatttgaattctaacctttgggccaaataggtggaattgaactttcctaataagctagacttttctgatttcactgtaagtcctttagaggaggtctgtatctttatttaaattgagagcgtaagagaaaatagaaatattgtccatttgggtagcacactaaggtagtgtaagagtggacgtttgagcttcacactcttacttctaattttctttgtttagcacttcaacccctgagctgcattagtctgcttaaacatactgattgatgaattattattgataaaaatagctaatatttatgaggtatttactatttgccagacatggaatttaatactaaacattatttaattcttacagaaactcaataaataagggctatttttatccccattttatagttgaggaaatggaagcatagaattaaatcagtagcataggtttatatgactagtaattgataaggccagtgtccaaacctaggttatttgactctagggctttccctctgttttcctataacgccttcctgaagttatagttttctgaatatatgtgggctatccagagaagtgtttggttatttgaaaatatgtttaagtgactcatgccggaagcacagcttcctagaacagagcagttggtactaggtaaggagtttgagccccttgaggctctgttagtttcactgtctcattgccagagactcaaaccttctactatgagtcatctaggattttttgacatttataagacagtgtagttgggtaagcagagatccagcacagctcctgaagaacccactcaaattagctgccccttggtcctgtcaccattaaccaagatgacttcacattaggaagggtaaagagaaatgtctcaactcttcaggcctatagtatcctataggaacattttttttccccaagcgtatccttcccagaaggctctgggctggtcttgacttgtgatagttcagctggaggcatccttcatgagtgtgggtctcagaattacagagtattggtgttgaggctcaagctccaatgttagctattggtggacccaggatgtgaactcaggtgccctgaatcctatgccaatgctatttcatctgtacttcacttccttccatacagttttaacttgccaaagtgaaaaaaagctctgtcaggaaaacagtttccaagatccaagatagcagtactcgataattgcattttaagactgtgcacctggtgtgactctcatgatttcattcatcatagtttcaggcagctagtggaattccagtgccagaaggggccttagacatcagnnnnnnnnnnnnnnnnnnnnatcagttaattctctgcctcatgttatagacaatgaaactgaggcttagtatgtattgattgacctgtctgaggatacccactgggattagtggcatacccaggtctagaatgcaagtattctatccccccaagaggaagtagaaagaacaccaagtctagagttaaagacctggatttgaatcccaggacttaactgtctgtgtaacattattgaaaaatcttctcagttgtaaaatggggataatagttacatattagcattgttgcaaagactaaattttgagctcttgtcttgtggtgttgggcagttttagttattggagaatgcccctagtttaacataaattgatattttaaatgtactgagtatggtaagaagggataaggctagataacaaataaatcctgctcttaaaaccgaggtgggatatatggcttaatacgttttcagctaagacttcattggcataatgctctcctaacaactgctgggcagattagccttgtgtagcagcaatggtatcgactgtagttcatccaacaggtaagtccagactactcctttgtccacaaagataggaaattcttggagtccactgttagccctacaggaagtgacaattctgtgacatttagtgaatgaactcatgggacaaataaatatattttcccattgttttctaggtgccacctttgacccatttggagcaccttctaaaccatcaggtcaggatttgctgggttcttttctgaacacatccagtgcttccagtgacccctttctccagcccacaagaagtccttcgcccacagtacatggtaaggaaatattttatattgtgttcagtggaacatagttttctgcaagatatcagtaagtgctcatatataaaagcaccctgtgggtgcttttttgataaaagcttcctcacacatctctgtttttgaaattaacaactcaccttaacatatcaaaatctctgggctgtcttacaggacagaaacctgcttaactttgttttgctctgctttcctatttgactatggtatccttttttgcattagagctacatggacagaatcataaatgacccttgattgtaggacatatgattattttatgtaccaataagaaagaaaaaaacactgccactatgaaatgactggaagatacttcttggttagagaaatctttgaaatgtgggaaaatatgtcttaaataaataaaatatgttagtagtccacaaaattggtattccaaagaacaaagtttgggatatgatagccactagttacgtgtggctgttgatgactctacatgtggctagtctgatttgagatacactccaagtataaaatacataccagatttcaaaacttagtacaaaaagggcatgtgaaacatctcatcaatatttttatattgatcatttattaacataatatattgaacatactgggttaaataaactatattattaaaaataatttcaatagtgtctttttactttttaaaatgtgactgctaggaaatataaaattacatatgtggcccaaattatatttctatgttagagacttaggttgtatagaaagagtaataataatcacatccatttataaaagtgtgtcacttaggtaacattgattaaaaccggaggtctgcagtgagggataaataactttgagccagagagttgtagctcattcctgatgtcgaagtctattgaacattattggccacaacctagaaggtgacgtattgttgaaggcatcctgagcttgcttggagaatgcagtccagtcatcagttgactttgggaaaccatgccaatgcaaaaggaagatgacttttgcaacactggtgaaactgaaacttgactaaaaaagattccaggaacaacttttgtggttcatttccaactagtctttaatctcaaactatttgaagtgcatcctcaggacaatatacaagaaattcccctcttacctctgagtcatgctcacttgagagagtctcctgattggatgttgactacctgtaggagaaaagatgcaggaatgtagagtagagttggttttctcactcatttaaaatgttaagtcatgtcattgctctgctcaaaatgcctccccattttactcagcatgaaaaccaaagtccttgaaatggcctgtgtagcctctgtatgctctagcatctcagtgcccgtgacctcatttcccattctttcccactttactctctgcattccagctgtactggcctctttgctgttgcactggctgtttcctctgcctcatactcttccccaggcatctgcatggctaagtccttcacctccttcaagtgtttgctcaaatgtcaccttctcagtggagtctactctgattcctccgtttcaaattgcaactcgtctccctgccctactctacattcccctttctgttgtgcttagtaacttccagtatatgcagtaattaacttatgtgttacatttttttgtcatctctctctctctattagaacatgaattccacaaaggcagggaattttgttttgttcattaatgcatccatagtgcctaaaagaattaccggcacatggtagctgctatctatctttccaatattaaatataaaatgaattaactcatttttcccatcaaagtttctttgatgcacagtgatagtgtcataaggctatatgttttcctgattttaatactttgaaattattgttttaataagagtactaccctttgtgtcccatggacgtgggtgttcatacttggcagcttggcagttttggatccagttttctgtttctgatgagctgattagaacatggtgtttataacccagtttaggccagttagtactcctttgttttgtggttacatttctcattttggtctgtattgtactagcgagtggaaagaattttctcctctccttgttgggaaagcaatgatcatttcactgttactgaatcaactccccgtcttcacataggacagaatataggtgacactcagatgtctgctttgggaggtcagacatcctcagggtacttcccccgggtttctgcaaggcgtcgccaatctctcatgaaaataaaaaaaatactgcctttgggctcaacaaatatttattgaacatctattctgaagagaataatcacttgggacatgatgttggaagaacaaataaataatcataataaaaggcaaaatagagactaaaatattaggtaattacctttttgaaaaaatatattcctgtttctctaacagaccttaagtttcttgaggatagataatgcatctttcagtctctgtcccctgatgtggtgccttgcatgtggtaggtagtcataagggtttgtgggtttgattagcaacagggttgaagttctgatacctacttctgcgtcttaattggatgtaagactaggatcagagcttaaaggaaatcagatagaacgtactagcaaaaccgtctaacttccacctcagtggaatgggttactgtgtaaaaatagaagggataaatagaaaagaaagaattattattgctgataatggcatatcctttttaacttaatgatgggaaggtactagatgacttggttggtactaagtaaacaaaacaaggaaataaaaggtttggaatgctaatcttgatgccttctggtggtgatggggtgtgtgtgtgcgtgtgtgtgtgttttaaatcccagttgcaatgtcagtttagtatttgcattttaataattgatttgtgtgggcaaaacctagaggtgcctcagaaagaaattcttcatcatggcatcctgtttcctatatagattttatagatgtgtaaaaaacttactacgcacatgtattcctctagtacacctgattccttttagccaaatatttcttttaaattatatgtttggaactttgagggggggtcagaatgatttattttgaagctgtaatgagtttattttgagtaccatagacacatccctgacaaccagcatagtgatgatgtatagccagtgcccagtacatgttctgcatgactcattattctcaactcatgtcacagcagaggagaaaacaaaatgtcagttttgagtggattatgcttctatacttaatgcttagcaaaggtaaactgagcttaaggtgttttcccccttttcttattgcacactgactctgtgttaaatttagaggtgggacacacacacataagatagttctttcctgacttcgagggactgacaattgaatggagacagacacatgctcaatgataactcaaagcgtgtggatatggaggtaaaaccaaagtgagacaaagaaggagcagagacaaataatatgtcgtttctgtcaagcctcatgtgaacaaccagaggtgaaggcagaacatattgaatgttgcagagtgtggcaagaactcagaaggaggagtggatatcttgggatcttgctggggccatgcaggcttcagggatggaatggcattatcctgtgtgaactcagaaaagtgggttctgagctctcttgttctcattctttttcttttccccatttgcagcttctagtacgcctgctgtgaacattcagccagatgtttctggaggttgggactggcatgctaaaccaggtaaaagcaggttattttctgtacacatttatataattgcaaaagcataatccttacccaagatgaagtgagtactcacagagtattgtggcctacctgtgtaatttgtgtcactttttcctaaagattcatattctagaagagcttttcccaatgcacttgatgacatgatagtgctacttatcatacaccatttaacttttctaaatttcatttgctgaatgtcttatcttgacaatagaatcagacggatataaatatatatcaaactctatcacttagaaactcttgggtttttttggcaagtctgagcctcagttttcttatctgaacaatggggataataattttggtcccacatagttgtgtaagtttaaataaaaaaaacttatataagaatttctggcacagtgtagcatgctgacaaatgtgaatattcttccttctttacaaagtacttacttcagggtgggatttgtctgtcatcaacaaggtctcctcctcatgaccactatggcatttatggagctgtcttgtgtgactgctcctgacattgagcaagttaagtgcacgcgtgcacatacaaacacatacacaatgggcttatcacaacaactttctgaagcagttgctgtttcctttttttattgtagcaaccccttccccacaacgtaacatttaccctgccaataatttccaagtatacaatacagtattatcagctacatgcactttgttgtgcaacagatccccagaacgaacccacctccccactgaccttctcacataactgaaactctacactcactaaataactccctacctctgcctccaccagcccctggccaccacccttctacatgagtttgactactttatatacctcccataagtagaatcatacagcatttgacttttgtggctggcttatttcacttagtataatatcctcaaggttcatctgtgttgtaacatgtgacaggatttccttctgtttttaatttaaaaattttttttggctggggcgtggtggctcacgcttataatcccagcactttgggaggctgatgtgggaggatcccttgaggccaggagttcatgaccagtccgggcaacatggcaaaaccccatctctacaaaaatacaaaagttagccaggtatggtggtgtgtgcctgtagtcccagctacttgggaggctgagatgggagaattacttaggcccaggaggttgaggctgcagtgagccgagatcacaccactgcactccagcctcggtgacagagtgagaaacctgtctcaaaaaaagatttttctttaaattgacagataaaattgtatgtatttgtcgtgtacaatatgatgttttgaagtacacatacactgtgatatggttaaatgtagctaattaacaaatgcatttcctcacatggttatcatttttgtggtgagaacatttaacatccattctctttggatttttcaagaatgtagtagatcatcattaactagagtcactatgctgtacaatggatctcttgacttattcctcctttctagctgtaataatatatcctttaaccaatgcctcctcatccctgccctacctccaaccaccccagcacctggtaaccaccattctactctttatttctatgagaccaacttttttagcttccacatgtgaatgagaacatgcagtatttgtctttctgtgcctggcttatttcacgtaacataatgctctctaggtttatccatgtcatctcaaatgataggaattcttcctttttatggctcaatagtattctattgtgtatatacaccatattttatttatccattcatccattaatggacacttaggttgattccatatcttggctgttgtgaatagtgctgcaataagcatgggagtgcagatatctctttgacatactgacttgatttcctttggatatatacccagtagcaggattgataaatcatatggcagttctatttttaatattttaaggaatctccaaattgtttcccataatggctgtactaatttacattcccaccaactgtgtccttttttctctacatccttgccaacatgttttttgttttttttaatagcaattctgacaggagtgaggtgatatgtcattttggttttgatttgcatttctatgatgattagtgttgttaggatttttttatacatctgttggttttatacgtctgttggttttcttctggtattcatctgtatgttttcttctggtaattccatagttttgggtcttacatttaaatctttaatggattttgagctgatttttttatatggtgagagataagagtctttttaccctgttgccttcttattctgttgattgttaccttccctgaacagcagtttttagcttgacaattgtcccatttgtttttcttttgttgcctgtgatgttggtttcatattatttctcttttttaaaactaatggtaaaatgctgaagctcaaagatgttaagcaagattcccacggtcactcaggaattggcaaagccagaatccagatccagacctaacttcgaatcttataggaaagagtgaagtcaggtgacatgaggacctggaaataaaacaaacactggaaataatagttcacacttgtggcctggaaacagcatttgtcttttctgtggtctgtccttgttcaaggccaccattcacccaggtcagggaaacagggtctagcaacttcttagacattttcaaaccctgtcctaatttgcctaggagacaaataaacagtaactctggaattctgaatttcagaattcagcctcaaacaactaactcattttcaatgaccttatttccttttcaggaggctttggaatgggaagcaagtcagctgccaccagcccaaccggatcctcgcatggtactcccacccatcaaagcaaaccccagactctggatccttttgccgaccttgggacactaggtacaaactcagaagatcaagatacaaataacatttatttatagctataaagcctcaaatctcagtctttggtgttacagcaagctggtattgtcacctggaacctcaaatagtgtgtattcttaagctatcctctgaaacctgagattggctttttaaaaaaggaaagcgataatcagatgtggggttagaaatcatctttattgattcatttctccagtgcctaattctggatgtgtagcatgaataaagttagagctttcaggggctcatggcaacagagtttggctgcgcaaaagtaatgcgtagggaaacagtatgagacagggctggtcagatggatttgtgccacatgatgccaaccttgcagaacactaactgtgatgcggtgatgttacctgtgagatcttcacaccgttccccttctctccattaactgtggtgctctccggtcaatttgtaaaattctatacagaaaatagactcaagtatcgtatttccagaatattttcaccatatgttaatagatgttacaggataagtgttctgagagcaggtgagattgggaagcactggtttcagtggattttgattaccactaagagggacacagtatccagagttctcaaactgatttcaccaaggagcctgttttcaaggaggggttcactggactactatgttctgaaacattttcttcctcctttttccttcctcctctagggcagtgcagatttgttaaataagggtggggtagccctgacacaaaggtttatcttggctatattgatagtctgtgatctcagaaagccctactgaggcatttagagccagatggagggaatgtgagcctggctaccgttgttgtctgtaactagtgtcagcatctttatcttccattctgtactatttagatgtttttcccttttaagaactctcaaaattattttatgcagtcattttcttctccacctttctttgtatcttactgaaaatttcaaattttaaagtaatattatatcagatgaaattttacttcaataaaatctcatttattatttatttttaatgcatttaatgcattgattcatccaacaagtatttaaggcacttttgtgccttctaggtgctaggactgttttagtaaaaaaaataaccaaacaaaacaaaactcctgccttaataaaacttacattatagaaggggaatcaaataataaattaacaaatatataatgtcaaataatgaaaacaataaaaataacagttaatagttattggggccttactatgtgccaggcactacttaaagtgttttacatatatcatttcatttaatcttcctcataatcttttgaagtagtgactgttataatcctcgttttacagatgaggaaacagggacacaacaggttaagtaacatgcacaaatcacaagctttcaacaccaagaagtctagctctggagcttgcactcataaaaggtttagaggttgatgtagctgagtgtgggaaggggtatcagttcagttcatccagtcaatggttttctacccttgagcattaattccctcatttcacaggtatttttgagtacttactatgtggtaggcattcaggatgtaataaagaatcaaagctgatgatattcctgttctttgaaacttgcactacagtgggaggaagaaactttaatcaaatgtaaaatatccgctactgtaggggctacacaagatggagcattttttaaaaagctccccaggtaattctaatgcacaatcaaggttgagaactactgctttgcttttaatgaggactgcagtggtctctggatttagctaccactttgtatttctgtaagttctctgcttcaatagcattaacaattagacttgctgagcatggggagaaaatattctagaagggtagacatcagagagtcctgcaatgttgatgagccccatgagtgcggggtcagcgtctgctttttcaccactgtatctgcagcctggcatctagaggatgctcagtagtgtttcctaaattaatgaataactggcagtgtggtaggcatatggcaaggttttcttagttctttaggcttttctgtatttaccaaattttaaaataaaaaaaacacatatgttcagaacagagtaagcttccttaaatataaaatgaaaccccagtgtagaatgaataccaagttttaggtgtatgttcccgtgctattggcaggagggctctgggacataggaagaaggaattcatgctgctagttatggaatgagtggggcaatgccaagcttgaagacaagccctgtcattacattttcctatcaccaagtgtttattgagccctgaagatgtaccaggcatgtgcttattagcatatgagcttacattattttataatatataacgtctctttgtttgcttaattgtgtaatactttcctatagttgttgtgtctttacagtatacctgtgatatagacatagttttgattaaacagatgaagaaactcaggctcaaaggagtgagttttttttacccagctttagaagagcaaagattctctatatcctgttttcagctatattcttagtgcccagcatagtacatgacacttggtaatgctcatcaaatagtggtgaattagtgtatatatgtatgaatgaatgaagaacgaatgcaagaatgaatgacagagctgagactcaaactcagattgatggtaagtccagtgatcatgatgcatttccagcagggaaggaaagtggagccccaggatcagaatagggaaagtatctatagaaagaagagatagtaagggatgagttgtagtgaaaggcttagcaattaggagaggaattaaggattactgagtgcagtaaatgaacatgacatttggaggtaggatgcacatagtctaatcccagctccattaattggctgtgtgatcatgagtatatcaggaaacctctctgagccttaatttccttatttttaaagtggagccagtgatactacttacttcctaagagtgttgtgtagatctgagcagtaatgtacataaacacattttgttaactctaaagagctatataaatattagttattttattattgttactttagacttattacatgaaagggtctttggacatcagcacatttcagttttctcattttacctctttaaatgcaagccacagctggttttcatattttggacatagcccagcttgtatgcaatgagtgcttaaaagtttggagattatggaatcaagattctacttaaattcctggcacaaaataacatcattttcaaagcttgaataagatcctttgtcctgtttaaagttatcagaatgttgactgtttttgctctccttcagtgaaatgcaagtagtatgaagttaaaacctacttgtgaaatttcaaaacatctttatttactcttgggcactaaccatgctttataacaaaaaatgatgaatcctaataattgaagtttaagtagcaccttaatgagtggactgttttattccccattcttgtcatttggtggttttttttaaattttattctagtgaagaaacagaatctgctcagaagatggaagggtggggaaggatggcacagtgggaagagccagggttcttttgacctggaggcaaagatccagaatcaagtctcggctcagctacttgctgtgtgcctctgagaaaaatcacttaactgctctgacctgcagtttgttcatctgaaggaaaaatgaggccattaaaacatacctagaaatgttattgtggggatgaaggaaataatatgtatgcctgcaattgctttatctatattaggaagattacttatgctgtcagtcaagggaatgactattaaagccactgcaaacagtgtcttaagacacaagagttagaggccactcaaaatagttttaccttctttatctctttttttctttaggtagttcttcctttgccagcaaacccaccacaccaactggattgggtggaggattcccgcctctcagctcgccacagaaggcgtctccccagcctatgggtggcgggtggcagcagggaggtgcctacaactggcagcagccacagcctaagcctcagcccagcatgccccactcctctccccagaaccgacccaactacaacgtgagcttctcagccatgcctgggggccagaacgaacgtgggaaaggatcaagtaatttgggtaaggataatggtatgggacctagctatggggcagcctgtctatgttgtcatactgcctgaatgtgtctctctgaaggtgacagtattttctgggtagtttcaattcagtagtttctgagggaatcttatagttgtagagataaaacatgattcctacccccaacgctgtacctggaggctcctaggttgactatgctcctaacttttataccattttgtgaccgtgggctcacttggctgtttatctccagactggaaccagatggagggcagggactgtgtcttagttgccatggtatcattagcacctagcatagtgcttggcatagggtaggcactaaatgaatgttgaagggatatgagtggagaggtagatggatcttaaagctgttattcctttggaagaggaagtggaagaaaaagttggggaatctttcaagcacattggtcatatttgccctttggtcccagttggtggactgcatgtgtcttggaaaacttggtctttcttatgctctgcttggtggattcctgagatcagcggggtacctatgatggtgccaacacctgaggctggaggatactctggataggatcttgacaatgaatgaaaagtaatatttttgcataggaaggatggttagatttgagtttattaaaagcctattttggtacattttatatttcagctgattttgtcagaccctccaatgaagtacataggaacatggtgagggaagaggcctttctctctatggaacatggaaaggcaattcttatgctcttcctaatagctgtagctaacatttattgagtccttactgtatggcaggtgctatcctaagcatttttcatgtacaggcatccccctttatttgtggttttatttgcagtttcagttacctgaggtcaactgcagtctgaaaatattaaatggaaaattccaggaataagcaattcatacatttcaaattgtgcactattatgagtagcgtgatgaaacctcgcactgtcttactccatcctgcctaggatgtgaagcatccctctgtctagcacatctatgttgtattctctacccacccattacttacttagtagccatctcggttatcagatcaaaaaaaagagtactgtatatatagggtctggtactatctgcagttttaggtgtccactgggggtcttggaacataccgcctgtgaataagtggagggactcctgtattatttcttataatcttcaaaaccaaccgcatatcataggaagctgtgacacagatcgatgaagtaatttcctaagtttatacagcttataagcgacagagccaggattcgaaccctggcaatctggctccagaacccctgcccttcattgctaccctctactggctagaacacaggtgctcacaacaccagcatgttaggaattcagttgtcggggatatgtaacatcatgtttgttcttgactagcagggatatttcctggacaattccatagagtcatgccaattcccctccatttttgagtagatagatgtggggcgagtgacttcaatcagcaaatacttatggagcatcttcagtgtagaaaacattgaggatgcagcagggaacaagaaacaaaatccctagtttcagagcacttacatttcagtgtgtgcaaaaacaggtatgtgtatgtcttacagtatagagatagcaaatggttttcaactcaaaaactgattttggttgatttgaatcgactgtatggactgttatgttttggttctattttgttttaacaagcatttagatagccaggcactgttctaagcattttaaatgttaactaattcattttcaaaacaagtccataaggtgagtaatattcctaacaccatccccattttatggatgaggaagttgaggagtagagataataagtaacttgcctagattacatcactaataagtggcagagctggaatgcaaacccagggagttggggtccaaagtctttgttcctagccaccatgctcggctgcctctccaaacaaattgagaaagattaagaggctacaaccagacttggagagaaagagcaaagtgattgactaaaatatcaacagaatatgggcagagaagtggtagcatgcatgaatttcaagtaccaaaccgagatcccagtgccaacactgatatgagttagttataatctggagggataatgagtatcctcatctaaagagaaggtacagtggaaatggaattggatttggcttcatgatccagcctccagttttaaccttgccacatatatgattctggacaggttcattttcttcatctgtagaatggatgcaacagtctcttaccctactcacagggtaagcaagcatgagggttaaggactgaatgcatattaaaaacaccttgaagactccagatgctgtgagataatgatacagcattatgtttaagaatgaaaactgtaatgattttcaaaaattatattgcagaagggaaacaaaaagcagctgattttgaagacctactctctggtcaaggtttcaatgctcacaaagacaaaaaggggcctcggacaatagctgagatgagaaaggaggaaatggccaaggaaatggatcctgagaaattaaaggtgagtgaggcccctgacgcagcttgattatcctatatgacaaagtcatgtgataaagtcatgtgtatggagctatcgccatgagagtaacctattgtcttagcccattcaggctgctataacaaaataccataaactaggtggcttataaacaacaggattttttttttctcatagttaatgaaggctgggaagtccaagatcaaggtgccagccattttggtgtctggtgagggccatcttcctggttcatggatggtggtcttttccctgtgtcctcataggcagaagaaagaggtcttgctcaggcctctttcataaggacactaatcccatttataagaggtctgtctcatgaactaatcacctcccaataggaagccctaacctcctaataccatcacctctggagttagaatttcaacatagcaattttggggggacacatacattcagaccatatcacctataaaaggcatgatagtagatttctggtggccactctatttcatttggtctttgcagctgtgatttgagtacagctgtgccctttaatagcaaagtagctctgaggaggttgcacacactgtttactttctttaataaaataaatgttattccatgatatggcaatatagatttcttttgtttgcctgttcaaatgagcagtggcactttctaagaggtgattttgttattcagatggcattcacattctaaagatgagtcattagaatttgctggtaagaagaatgcattatttatgttttctctttctgctttgagagcttttttattaaaccagattgactgaagcccccaggatcttttctctaccgatagagaaatatttatgtacctgagacttaccaattcctgcaacattagacctggagctttggaaagtagaggagagaaaggctgagggaagtgtggctcctgtcttccccattgtctccctctacttttaaccaaagcagttccacttttctctctttctgattctggaggtttaggtaaaattagatttgaggtttttcctcaaatcagagtcaacatacttttttcctcaaatcaacatactgttttagcatgtttcagcattttgtttttttaagtttgcaattcagcgaatctaacccctttgtttcacagctgaaaaaaaaccacataacttcatagatgaagatgttgtatggacaggcggatgcggattagctgggaaacagagggtggttctgttgatgagtggtatgaggtctggaagagtttgtaaagatcaagagaattggaatgctcttcacagatggagaggttgagttcctatgtgacaaaatactaaatatgctgatactacaacaaactgaaagaggaggatgtaatctgtctctgtattaaagcatctgcaaaaccagtacttaaacagcaagtcaatcttaacacattctgaaaacatataccaccgttctgtataatttcctgacagatttgttgcagatgtatataatatacatctaatataacttagattctttgatacattttttagtacaatgtagggtctttcatttgcatgtttttcactccacccaatgtcacagaagcttaatatttcttccaaaaactttgtgcttcatctcaataaccgttgttcattaggcaaattcggacagtttcctataaaagaaagctgtttatttcatttaaaccatgtttgattatttaattggtacagggtatgtaattgtttgggagggtagctgtcattaatgtgactaaaccattcatccagcaacactcacttagctgaactcctgttaggtactcaatgctgatacagttttatgatccctctgacttaatcacctcatttgttcaaactgtgaatgttcatagttcaaataaatggctaaatgggtcaattcacgtaacaagcctttttgagctctgttctgcaccaggttacttatttggttccgagatacagtgatatataagaaataatacttttcctcaaacagctctgcctaatggcaggcaaagagaaacacacaattacaataaagtgtggtacatattatggtagaaatatgtttaaggtagagtggcccagagaagtttggcccttttttaaggtttacttatttagtgcagtatctaccctcatggagtttatattgagtataactctgggggtggggatgggagagaaaggaattcaaactcgcaaagtctaacagtgtgaaatttctcagcacccttttgaaagatgatagagttaaccagggagacaaggtaggagattgaggaggagaagcattccaggtagaggaaacagcctggatcatacaggttgccctaagtgttttgatgttgctggagcagaaggggtttctagagtcctagtggaaaccttctgaactagtaagtaagcatttgaatttcttaatcccctttgtgtttacagattctggaatggattgaaggcaaagaaagaaatatcagagcccttctttccacgatgcataccgtactatgggctggggagaccaagtggaaaccagttggcatggcagacctggtaacaccagagcaggtgaagaaggtgtacaggaaggctgtcctggtggtgcacccagataaagtgggtataacctgccctgttgtgtaacttgtcaggtccttgcttcattatcttatgagtatgtgttttactttaaatgtgctggttcatatggcctatttttaataaaattaagtcaatgagctaaaatcagatatttaaacaaatagttatactttatgaaatgagaaagacgatatcaaactatatattacaggggcttatttagagagagtaagatttacccagtgattaatttttagggctcagaagtaaattgtgtctgagtacggtggctcatgcctgtaatcccagcactttggggggggcagggtaggcgaatcgctcgagccctcaagtttgagaccagcctgggcaacatgacaaaaccccgtccctacaaaaaaaataaaaaaattagctggtgtggtggcataagcctgtagtcttagccactcgggaggttgaggtaggaggatcacttgagcctgggtgatcaaggctgcagtgagctgagatcgctccactgtactccagcctgggcaacagagtgagaccctgtctccaaaaaaagaaaagaaaaagtaaattgtgtcctggcttacaatagtaaggacaggctaagagctggacagaagaaaactcctttcctttagagatacagcagtatagttagctaggatggtaatgaaaaagcttcagaatgtagttggtaaaatttgtgagaatcaataaaatattcagaatggaattaaatttgccctctcttgattattactacattgattatgtcagtttatgttttcattgaagtatatatacatctaagggctctaccttgtcagaaacttcaagtaactcatggacaaatgaaatcatcatataatacatagaaacattcagcaagaagtgagtcatcttgctgtcacatagactataccagtcatatgacatgaagctatgatcgaagtgccacttgggaacacaggcttgaatttgatgcatatgattttcatctctccacatttttttgtactagtctgaaaagaagaattaatgagaagcaatggtagtgcttgaattttgatgaatcaaaagagaaggagaaacaagagcccagaaaaatccacaaactgtattccccattatgactctcaaagaactttttagaaatgggaaaatgggagttaaaaacagtcaatagagatgggctgtcatgaacctttgtcatttggcagatacgtctggagaacagagatacgtcttgtgctgcctgataagctctctgttgtctacttcttgatggattactactacccttgtgcatttctagggggaggtcattatggggaggttatagtaatttgggtcagatatagtagattaggctgaaaaggagaaatggccaaatagaaaaacatttccattgcttagagcccatatattggcagtgaaaaatttaatattaatgaaattttggtctgtggtatctaatgtgtgtttttgttttctctacaggctactgggcaaccctatgaacaatacgcaaagatgattttcatggagctcaatgatgcctggtctgaatttgaaaaccaaggccaaaagcccttatattaatttatgagcttttccatctctgctgcagacctgtgctaatgcttagtgtgtgtcacaattctgaggttttcgcagatgaaccaaaaactccagtaacatgttttcagtactaaaccgttaagttactcatgaattaatttctcattgataaggaatgtggatgtttggtttctccaaagttcccaccataaaagatccaaagcatgagaggaacttctagtcagatgaccttgcagaaccaccgcattccaccctgccctttggggagcctactcagcattctacctggggaaatggaaaacagaggccaccacccatgaaggcataacacccatcacattgtctgagaataggattaatgagcaaaagttatgataatagagttatatgatggtttaatggtttctagatttttcttggaaagatataatttgagcagtggctttatgcagactccaagaacaaaaccaccaggtatttttttttaagtaaaaatttactaaggcctttagcataatactgtaaatgtcttttggtcaagagaactaacaaatataaaggaacttgaaatgtggggagtgataatagtccagtgattaaactacagtccagtgattaccaccaactttctgactaagctaaaaatgaatgaaaatggtggctaaagaaaatagggactctgaagatgtcgaaatctttattcctggttaggaaggtgggccgctacccttctttccctttagaaaactgtgattaattaaataaaaagtcttactactataacaactctaaacctggtttaaatgaaacatctaattttgctgtaaggcttaatgctcttcttttgtttagccaagaaaacattcttagttggaaacaggtggtaaagtagtttggcctgttcacaacttatcaggaccaatatctagtgtggactcagtgttctctaggtttgtgagcagttgtggtaagagaatggaaggcaacactgaataggagttaagggaatggcacgatcacagtgagagagctgcactcacctgcagacccagtcagatggcttgtcagtatctgctctgaggaaccaggtcccacctccccacaaggcaaatctagacccattaaattattacagtgggcttttttgttttaaaagtggttggggatccacaggaacgacattcatacagggacatttgtgaaagcaaagcaagaatgaatgctttcccgatctcagactggctggattcagatcagtgtgttggctggttctcattttaaggggtaagcagtttgctattctgtgactttagtagatctcttttgtgtgcacatatacaatgtgcattatacatatatattaaatatatccacaaagcagatgggcaaaaagattttcatgctaatcttcaaaggttcatgctcaatattgtgaaaagcttttaaaagttgttttgaaaagacaatcattttttgtttttgttttaactttcttgtggcaagctataccggaaaagcggcatgtcaaaaatactttaggttctacatagatctctttctctcttttgttttgtttgtttgtttgttaaagttcattatttattttaccttttactgacaatgtgaaactcgaagaaaatgttctctttttaaatatacagtcataaactgttcaaggtaaccataacaaactaggtgttatttattaacgtattataaaataatgtttgatccagtatgtgcttgtcttatttaaaattggaatgtgagacatgttgctgtgacctgtttttctttctcattcacatttgtagatattgtgtgaactacagtatataatgataacaattaaaaggatattctgtggatgtcacgtattttgaaatgatagaactacattagctttgtatcatgtttggataattcatcaatgttcacagtttaaaacatcattaaacattatgtaattacaatgagaaagaatcttacttaaatttggagattttcccccacatctcttttccggatacattataattctggacccctatttatctcaaaactcttaatatatgcagaccaacaggtctttgcattccttttaaataactggttgtgacaaagcttgttgttgatcagattcactgtttcatcatatttattgtaatatattttttgttttgtaaatatgttacaacaaaatgtgattggtctaaaatatttgtaatgtatattaaaaggttcaaaaatatttgtataaatctaagttatttgggtacttgtaggaatacaatgaggagcttgaatgccaccttctgacatgatttacttttaaggaaagttatgaggagagaatacaaaaagcatgcaccaaaatgtaatctgacaggatttctggatttatacgtaatcactcctgccccaacacacacacacacacacacacacacacacacacacacatgcacgcacacatgattttgattatgctacatgatatatgtttcaaaaagaattagcatagaaatcctggtctcctagccaaaaaaatcaaaggattttcaaaaaaacgaatctgtatgttgaggcaaaaggattgaacctggaagtctgggactttatcatagaaacaaagtctcagatattttagttctttggaaacaaatgctgtaattcaaaagcatttgacctgtcactgtactatctacatgtggaagaatgttcaagttgaatcctaatgccgtgaatgaaacacagtctgtgtagggaatgagcaaaaaagttgaattcccattgctttttggcccttttggctaaaataaatgtagcatctaattttatcagtttaacatctgatatgtcttctatccatgtacaatattttaaatggattttgtggagcagggagatggaataggagtttcccccacccattccacacatcagcctggtaatgcagtaactgcaggaatagttcacctccgcctcactaaaacaacaacaacaacaacaaaagacaaaatttgaattccagaaatagttattgcagcaacaagtcagtctccctgctggaaacacctatcagggaagctggctcaagtagcagattttgattattctaaagataaatcatggtttttgggaatagtgatacatgttggtttgagattaaaagactgggtttaaatcctagtttttccatttatagacttttttttttttttaagagagtcttgctctgtcacctaggctgaaatgcagtgggtctgtcacagctctctgcaacccctaactcctgagctcaagtgatcctctctcctcagccctcttgagtagctaggactgcaggtgagagccaccatgcctggttttttttttttttttcagacggggtcttgctgtgttgcccaggatggtcttgaactcctggcctcaagtgatcctccagcctcagcctcccaaagtgctgggattacaggcatgagccactgtgccaagccttacagactcttatattggacaagtttcttgaactgagtcttaattttatcacctgtaaaatagaattctaacaaccctgcaatggaggaattaagaactgtgtatataaactcttaacaagcgggtactcactaaatagtaattattgttattgttactgatagtaaataagacaaagtatatcactgtaggtgggtattggagctggaattacatggaaacctcatattctagggagtgacacaagtaggaaaaggcaacccaaagttacttttaccttggtccttattccttatctccttgggtttacagagatctgtctacataaaatggcaaagaggtttgcattgtagtttctgtaaagggaatagctatgtaaaaagaagtagtgattgagcattaggaaggaaaaccaacatttacggatttcaattagtgttgcatcattcttgcatttaacttatgcactgacttgcaagcctaccccagtgtagatataacatcctggcatttatcttgtgtgcactgccctaggtgttaccatatatatatatatatgttttatatatatttttttctcacttaattcccccaaagattctgagacaggtttttgtaaatcttacctcaggaagctaaagcatggagaaatttacccagagctggagcttgaggctatatatttttttttttctgaggatagggagagatgatactgtgtatggtaaacttattaatatttgttaattcagccaacattttgtgtatactgtatgcaagatgctaatagatatgctggagaaaattaagacagtgaatggatttgatgccctgtgaagcataagaggttactgttatttctaattactacaagaattcttgcttcttggtgcataagatctactgtggggaatagtacaagtgctgaccatctgactttagagctgaacagtttgggacttgatctcagcttccctattcactggttactgggagcttgttttcctatctgtaagatagaggcaataaaacctagcttatcatgcgagactattgaatgcaaggagagaatattaaaattcatcccagtaagtccactgtagtcctaggcagcatgacagaggtcacagatcttacaagtaacatatcaatggcaagttggggataaggatttggtttttagggttttactttctgtttttgatgactcttatttttgagaaaatgtggaaggagtaagtagaagaacagtttttttcagtgcaacatcaggcaaaagaaaagcagatttttttcagatggttaaagcctatggcaaaatagctaactttctctttaaggtgattggtaacctggaaaggacagctggcgtgggcagaaaacttgttcaagacaaacactgtcccagcattttttaaattccagacattaccctggggcaaacacctcaactttttctttcataccaccttccaatatcttactcctgagcctagggtgctcaaaccaaactctgcttctgatgtgttgtcagttttctctaaaatcacttatcttctgtgggactggagtcaggctgatgtggaaggctcccgcaaaccctatttaggctctctggagacagaatgggtggttggaaatggaagggggaatgagggaaatttaaccccatagaatatcttccccatgagagtagcttagcactacacgaagaaagctaaaaaccacagacttccagggcttgtctgatacgcaggttcccttgagtgctctaataggtattagaaataatatgatagggaaacaagctcttgtaggggaggaagaatctttttctctacctatcttaggttctccggctgggtccttgtgcattagactggccaaagacagatgaacaaaagtaaagcaagtttatcaacacgtgcgttgttcatataggtaacatgggaatactcagagataagcaactcaaagatttggttagaacttgggtttatacagcatattagccaaggaacaataaatttttaaagaaatgacaagataaaggatcttgagtctctaggggcagcaaattgtcggaaaacaaatatatgggagactagttgcagatgaaggccaaatactaaggtttatcatgtagatttttcttgtgttgtctccaggctgacaggggtctaaaattgtctctggtgattaatctttgtctttcctggtagagcaggaaggaggtacaccttcgtaaacttatatcctgctttttggcaaatagagggagggcagagtgcttttctagtaccgtgtacctatttgcttcttcctaattgccttcagctcaaaataatccttaaaccaaagtggcatacactgccaatgctcttgagtagattgaaggctccaaagtaaaaagtgctgtactgtagtattggatctccaagcatcagcagtgagtcaggtattacaatgctgttttcagtgagtgtgccatccgtctatgaggagaaatgagaggagctagaaaaataaactgacagctagaaaaatactccactgaatcaacaaatagacatttcttgaaacagtaacatgctcaatgtgcaattttgaaaaagtaaactgagcaaggatcatgaaacatgatggtggtgagaatttatacttctcaggtagccaggggaagctaggtttccacagattcctttgtctttcagtccttttgaaaacggagaaaaagcaagagaagagggacggcaccatcaggtagagtggatctcagctagaatgaggggaagtggcccagaatccaacctcctccaaagagctgtgtgacaggcaagtcctatcctttctgcacctctttccttaaatgtaagttgaagcatttggaccagactgtttcaatgatcttctagattgcttttgccaaaacagaactctccattcctgtaagataagtacacaatggctctcagagatctaaaaactggccttggttacctgcaaactttgaggccccaaggcacaaaaataatagctttttttttttatttttttttttaaggttcatgaaagcttcggacacaaaagcttatatggtcttcgtctctataaataaaccagggagtaaagaaaaaccccgctagtttcagtaaagcgttgctattaagcaaagcaaacctatgcaaatatcaagttcttaatgaggagtgtttcctaaggggcctgtcctctggtaccccgcctctcctctgccacagtcatgtgaaggcagacaggcacacactcgcacactagcacgcacttgggagctcagggaacataacactggttagtgagtcggtgtccctctcccatcgattgcaacttttcccctccttccctctcctgcctctccccactttctacatctccgttctcaggaaggctcagggaggatcccccgctgcgtgcactgcgttctgagaggccggggagagactctgggcccgcggtcggggcggagccaaggtcccaacccacattgaacgggcttgaggattacttggagggctcaggatctaggaggagggcccagggcactgggttggggttactctgggaaagctctgtgggaccaggtgggaccttagggctggagatggactctgcgagctgggggcggagttctagactggcaggagcggagttctgggtggcgggggcggggtcgggaccagcagggacggcctctgagagttgggggcggaattctgggccggtgagggctggggcgggaccagcaggggaggcctccgcgagctaggggaggagctctgcattgtctggggcggggcttcgagtagcggtagcgaggtctggagccgcaggcgctgcctccgcgaggtaggggaggagctctgtactgtcaggggcggggctctgagtagcgaggccgggtctgaactatcaggcgcggcctctgcgagctgggggcggggttctgcaccggcgggggcggggttgtgagtggtgggggcggggtctggagcagcaggcgccgcgtttgcgagctaaggtcggagttctgcaccggcgggggcggggctctgcgtggccggggcgggctcggggatccgcggggcgactcccggtctggcttgggcaggctgcccgggccgtggcaggaagccggaagcagccgcggccccagttcgggagacatggcgggcgttaaaggtacatcgcggtccccggctcgcttgtcgtgtggtggggttgccacctccgttccggtcaagcctggggctgcgccttccgcgcgccgttggggaacggcctcaccacccttcccgcctctccggttcgggaggcgatcgaccgctcccttcgtcccttggggtgtgggtggagcggcgtttcgggggagccttggccctttttgcaaggccgctggccttcctgctctccagtggcggcaccagacccctccccagcctgagccctcggcgagagcggcgccctccacctctcctgagtttttaaacaaggtttccacttcttgacgccaccctaacgcctttcttctggttttctgcccctccgcagtttcctatttgccacaaaggaccctttgtctccagcgttcttagcattgggaaacttaatcctctttttcctaatgatttttccaactgggcagagttgaccgcgggcgggtgtcaatggaaagcacccagaaagacggtgtttctcgcagtcgtggagagtagattacgtgtaattttaatactgctttcttcggtgttttctctgtttatggacagagcagaaaccagtgtgtgtgtagtatgtgttttttgcatggggcagttggtaaaaacaccgcgtcccttatctgtatggcttcagagcaatgcgagacggaaaaggttttttgcaaggcttcctgtattttggtaggaaaacattccatttctaatctgtcgaatagagtagcatgacttgtttttatattggcttttatatcatccttgaaatttgcacccaaagatatccccagttaacatctgctataaacatgtagatagtatatatacgagtacgcctctgttcannnnnnnnnnnnnnnnnnnntgccgaaaacagatgaaaagtagtgtctcagtactacacatgatcagaaactaccaaatcatgatcacgtttatgtgtgaatgtgttagaaaattgtgatgtagtgaaaaaaaaggaagtctgaaatggaaacggactaagggaaggaagcattttacagattgttcaacttttattgaggaactactgtatgccagagacttaggatacaaagataaatgagaagttattggtgggtgacagagctggaaataattatattactatgtcagtgtttatgttgggctcagatgcggtgggagaacagatggtgggttggattttgtcctccaaaaagatgtgttcaagctctaattccctggtacctgtgaatgtgatcttatttggaagtagtatctttgcagatataatcaaattaaaatgataactggtttaaggtgggccctaatccaatgactggtgtccttataagaagaggggaatttagacatagagacatacagggagaataccatgggaagacggagacagaaattggagtgatgcagctacaaagtcaggagcaccaaagattgttggcaaccatgctggcaaccactgagtgttaggaagaggcaaggaagggtgcttccctacagccttcagagggagtgtggtggcgctgctgacaccttgatttcagaagtccagcctccagaactgtcagaagataaatttctgttgttctcagccatccagtttgtggtactttgtaacggcagccctaggaagctgatgcaggtgggattgattcccctgctccagagaaaggactgttttcacagaagaggcgatgcttgaactgaatctgaagggatcaatgtggcttcccttggcaaggcatggagtgaaggtggagtatatcccaagtggggaggacagcacgtgacatggcgcagggcttatgaaacaacatgccttcttctcttcaggtacttaagctacattagtaagaccagaacttagtggtgagggttgaagctggctggacaggcagttaggagtgagtcaggcgatggtgagcctccgtgccagaacaacttgtaggctgtggaagcaaccgcaaagggatggcagcggtgatatatatagttgaaagatcactgtctgctgtgtagaggatggattggaagagtcacagaggcaggaataagaggttaagggcctgcaccagggctgtagcagagagtttaagaagtctgggagattgagtcaccttgacctactgattcattggaaggtggaatgcaatcatggtgtcagtcctctaagataggacctttaaagtgtagggatagtggtttggttttacacgtgttacacatgttgaatttgaggttcttgttggcggtcaaggcagagaagtccagactggaggtggaagtacaggcctagttctttaggacctactctgggctggagcatcagttgcggccgggcccttgtggtagtaggagctttgggttgaacataagttttcagcaggagtgcgtggagtgaaaagagagatggggttggatttttggtcaactccaactttaagagattcagaggatgtgattcctgaaaaaagaggaaaaaaaagaccaaaaagaatcaaacagaaagatggttgtgaacgttgagaaactggtatcagaacagaaggaagaggtctgcagtacctagctttgacaggcctcatggaggagggggtactgccgatggtcaggcacagaggagaggagcaaagcctgctgggaaaagatcatctgaatgaaatagtatgtggtatttgctttccatccacacatgggcattttccattaaagagtggaaatgtaaaaagatatgttaaaattgacagtgtttctttgtcccttaacatgtgtatactttcagatgttttttaaaaagcactttggcaccttcctattaaagagtctctctaaatcttctctcaagtaaaaggaagcaatcaaaaatgttcattggcttaattaattagtttaatactaattatgagtattatggacttttttcagaagaaaatttggataagatagtctcctatgcttttgatttctacctttatcaaagaacattgctaaaatgagtagatacctgagtcagtcagcatttatttggctacctccttttgccaagcactttacatagattatctcatttaattcccataagctcaataaggtggcaccattatttccattttacaggtgagaaatcaggttcagaggattagcttctacccaaagtcataagaccagatggtggcagagttaagatttgactcatgtttgtgactcagagctcaagattttgtaacaaccttgatactctgtttctcactcagcagcacaacaagggcaaatacgttcctactcccgcagagactagtgtccaatagatacagggaatacatattttattcagtgcacactagttgggaattgtttcctacaaagacatgaaaacaatcttcaaatacttgcagtactgtggtttggggaggcaaaatgatcaaaggtatatattacagggaggcagttctggatataatttaaagaaggagggctttcaacatttagaagctgttggaattaaatgacttgccttgggaggtagtgagttttccttcactggagttatgtggaccaactggctgccctctggtgacaaatacagagggaattcatccattggataggggttaggtactggaattacttgagacctttgtatactttatgatttttaaggtggcagacatgggtcattgtcttaatcagtttgggctactataagaaatatattttagactgggtggcttaaacaacaaacatttagtttccacagttctgaagactgggaagtccaaaattgtggtgcagtcagatctggtgtctggtgagagccagcttcctggtttgcaggcctgctttctgctctcacattggagaacagagggagagaaacacagagagagtgtgtgctctactttctctcttcttataagggcactcatcccatcgtggagaccccaccctcatgacctcatctgaacctaattatctcccaaaggtccacctcctgatagcatctcacggtgagagggatggagccgggaaggtttcaacatgtgaatttgaaagggacacacataatgcagtctgtaacgggtcaaatgtaacctcaataaaatgagtaaattgctacatttgcttgaatttgggacctttttttctttcttttttattttagtaaatgtttttattgataaatgattcacataccataaaattaacattcttaaagtgtaagatttcatggtttttagtatattcagaaggttatgcagccatcactactatctaattccagaaaatttactcatccgccaaagaaactctggacctattagaagtcactccccatttccccaaaccctctagtgcctgacaacctctactgtgggaactttaacttttggctttatttttcacagctctcgtggcattatccttcagtggggctattggactgacttttcttatgctgggatgtgccttagaggattatgggtaagttatcatttcaaaaagaactattcctctttctgtgtctttgtcactattagtatgggtgttagagagttcggtcaatttagcaccaagttctaaccagtgagttagtggagcccagtttatgaacacagtccctttgtgggtcaggtgtacttttgcagagggctctgttaaaaattgatgtattcattccataagcatttgtttaacacctactctggactagctggggacacacaaatgaagagagagtcctgtcctcaaagaggaggtaaagttctagttgtgagtgagagacaggcaaacggtctagtcagtaatctggcagctgcagtggagatgccagcacagtacgctggagctcggataaagtgcacctgagtttcagtgggacagtcagggaaggctgcatggcagaggttgtatctgagccaagactaggtggatgaataagagtttttcagggtgatgagtcaggggaggacattccaggcagagggaacattctacacattttttcattcaaccattgttggttgaatgcttcccatgtgccagctactgttatgggaactagggattaagacataagaaaacaaaggtcctgc

SEQ ID NO: 872 - DNA, 5760 bp, Homo sapiens
caaaattataaccccgcacaccgacttgcatgcaattatcatagcccgagtgctcctccgttgagagacttcgcccccgagaccgctgactgtgaatgacaaatcaaaagtcagggttgcagaatcagccggactttcctgctcatttgcagcagagggaggaagcagagaatgaaagattctgaaaataaaggtgcctcatctccagacatggagcccagctatgggggaggtctctttgacatggtaaaaggaggtgcagggaggctctttagtaacctaaaggacaacttgaaagacaccctcaaagacacatcttctagagtgatacaatctgtgaccagctacacaaagggagatttagacttcacttatgttacctccagaattattgtgatgtcctttcctctggacaatgttgacataggattcaggaatcaggttgatgacattcgaagctttttggattccagacatcttgaccactacacagtatacaatctgtcacctaagtcttatcgaactgccaagtttcacagccgggtctcagaatgcagttggcccattaggcaggctcccagtctgcacaacctttttgctgtgtgtcggaatatgtataactggctactgcagaatcccaaaaatgtctgtgttgtccactgcttggatggacgggcggcatcatcaattctggttggtgctatgttcattttctgtaatctctactctactcctggcccagccattcgattgctatatgcaaagcgaccaggaattggactttcaccatcccataggagatacctgggctatatgtgtgacctactggcagacaagccctaccgccctcacttcaagcctctcacaattaagtcgatcactgtcagtccaataccctttttcaacaaacagaggaatggatgtcgcccttactgtgatgtactcattggagaaaccaaaatatattcgacttgcacagattttgaacgaatgaaagaatatcgtgtccaagatggaaaaatcttcattcccttgaacatcactgtgcaaggagacgtggttgtttccatgtatcacttgaggtcaaccattgggagccggctacaggctaaggtgaccaacacacagatattccagcttcagtttcacactggattcataccactggacacaacagttttaaagttcaccaagcctgagttagatgcatgtgatgtaccagaaaaatatcctcagctatttcaggtgacactggatgtagaactacagccccatgacaaagtaatagacttaactccaccatgggaacattactgcacaaaagatgtcaatcccagcatcctcttctcttctcaccaggaacatcaagatacgctggccttaggaggacaggctccaatagatatccctccagacaaccccaggcattacggacaaagtggtttctttgcctctctctgttggcaagatcagaaatcggagaagtcattctgtgaggaagaccacgctgccctagtgaatcaggaaagtgagcaatcagatgatgaacttctgacactttccagtccgcatggcaatgccaatggtgacaagcctcatggagtcaagaagcccagcaaaaagcagcaggagccagcagcccctccaccccctgaggatgtggaccttttgggcctggaagggtctgcaatgagtaacagcttctctccgccagcggctcctcccaccaattctgaactactgagtgacctgtttgggggtggaggtgcagctggtcccacccaggctggacagtcaggagtggaagatgtgtttcatcctagtggacctgcgtctacccagtcaacaccacgccgctctgccacctccacctctgcgtctccaaccctaagagtgggagaaggtgccacctttgacccatttggagcaccttctaaaccatcaggtcaggatttgctgggttcttttctgaacacatccagtgcttccagtgacccctttctccagcccacaagaagtccttcgcccacagtacatgcttctagtacgcctgctgtgaacattcagccagatgtttctggaggttgggactggcatgctaaaccaggaggctttggaatgggaagcaagtcagctgccaccagcccaaccggatcctcgcatggtactcccacccatcaaagcaaaccccagactctggatccttttgccgaccttgggacactaggtagttcttcctttgccagcaaacccaccacaccaactggattgggtggaggattcccgcctctcagctcgccacagaaggcgtctccccagcctatgggtggcgggtggcagcagggaggtgcctacaactggcagcagccacagcctaagcctcagcccagcatgccccactcctctccccagaaccgacccaactacaacgtgagcttctcagccatgcctgggggccagaacgaacgtgggaaaggatcaagtaatttggaagggaaacaaaaagcagctgattttgaagacctactctctggtcaaggtttcaatgctcacaaagacaaaaaggggcctcggacaatagctgagatgagaaaggaggaaatggccaaggaaatggatcctgagaaattaaagattctggaatggattgaaggcaaagaaagaaatatcagagcccttctttccacgatgcataccgtactatgggctggggagaccaagtggaaaccagttggcatggcagacctggtaacaccagagcaggtgaagaaggtgtacaggaaggctgtcctggtggtgcacccagataaagctactgggcaaccctatgaacaatacgcaaagatgattttcatggagctcaatgatgcctggtctgaatttgaaaaccaaggccaaaagcccttatattaatttatgagcttttccatctctgctgcagacctgtgctaatgcttagtgtgtgtcacaattctgaggttttcgcagatgaaccaaaaactccagtaacatgttttcagtactaaaccgttaagttactcatgaattaatttctcattgataaggaatgtggatgtttggtttctccaaagttcccaccataaaagatccaaagcatgagaggaacttctagtcagatgaccttgcagaaccaccgcattccaccctgccctttggggagcctactcagcattctacctggggaaatggaaaacagaggccaccacccatgaaggcataacacccatcacattgtctgagaataggattaatgagcaaaagttatgataatagagttatatgatggtttaatggtttctagatttttcttggaaagatataatttgagcagtggctttatgcagactccaagaacaaaaccaccaggtatttttttttaagtaaaaatttactaaggcctttagcataatactgtaaatgtcttttggtcaagagaactaacaaatataaaggaacttgaaatgtggggagtgataatagtccagtgattaaactacagtccagtgattaccaccaactttctgactaagctaaaaatgaatgaaaatggtggctaaagaaaatagggactctgaagatgtcgaaatctttattcctggttaggaaggtgggccgctacccttctttccctttagaaaactgtgattaattaaataaaaagtcttactactataacaactctaaacctggtttaaatgaaacatctaattttgctgtaaggcttaatgctcttcttttgtttagccaagaaaacattcttagttggaaacaggtggtaaagtagtttggcctgttcacaacttatcaggaccaatatctagtgtggactcagtgttctctaggtttgtgagcagttgtggtaagagaatggaaggcaacactgaataggagttaagggaatggcacgatcacagtgagagagctgcactcacctgcagacccagtcagatggcttgtcagtatctgctctgaggaaccaggtcccacctccccacaaggcaaatctagacccattaaattattacagtgggcttttttgttttaaaagtggttggggatccacaggaacgacattcatacagggacatttgtgaaagcaaagcaagaatgaatgctttcccgatctcagactggctggattcagatcagtgtgttggctggttctcattttaaggggtaagcagtttgctattctgtgactttagtagatctcttttgtgtgcacatatacaatgtgcattatacatatatattaaatatatccacaaagcagatgggcaaaaagattttcatgctaatcttcaaaggttcatgctcaatattgtgaaaagcttttaaaagttgttttgaaaagacaatcattttttgtttttgttttaactttcttgtggcaagctataccggaaaagcggcatgtcaaaaatactttaggttctacatagatctctttctctcttttgttttgtttgtttgtttgttaaagttcattatttattttaccttttactgacaatgtgaaactcgaagaaaatgttctctttttaaatatacagtcataaactgttcaaggtaaccataacaaactaggtgttatttattaacgtattataaaataatgtttgatccagtatgtgcttgtcttatttaaaattggaatgtgagacatgttgctgtgacctgtttttctttctcattcacatttgtagatattgtgtgaactacagtatataatgataacaattaaaaggatattctgtggatgtcacgtattttgaaatgatagaactacattagctttgtatcatgtttggataattcatcaatgttcacagtttaaaacatcattaaacattatgtaattacaatgagaaagaatcttacttaaatttggagattttcccccacatctcttttccggatacattataattctggacccctatttatctcaaaactcttaatatatgcagaccaacaggtctttgcattccttttaaataactggttgtgacaaagcttgttgttgatcagattcactgtttcatcatatttattgtaatatattttttgttttgtaaatatgttacaacaaaatgtgattggtctaaaatatttgtaatgtatattaaaaggttcaaaaatatttgtataaatctaagttatttgggtacttgtaggaatacaatgaggagcttgaatgccaccttctgacatgatttacttttaaggaaagttatgaggagagaatacaaaaagcatgcaccaaaatgtaatctgacaggatttctggatttatacgtaatcactcctgccccaacacacacacacacacacacacacacacacacacacacatgcacgcacacatgattttgattatgctacatgatatatgtttcaaaaagaattagcatagaaatcctggtctcctagccaaaaaaatcaaaggattttcaaaaaaacgaatctgtatgttgaggcaaaaggattgaacctggaagtctgggactttatcatagaaacaaagtctcagatattttagttctttggaaacaaatgctgtaattcaaaagcatttgacctgtcactgtactatctacatgtggaagaatgttcaagttgaatcctaatgccgtgaatgaaacacagtctgtgtagggaatgagcaaaaaagttgaattcccattgctttttggcccttttggctaaaataaatgtagcatctaattttatcagttt

SEQ ID NO: 873 - protein, 905 aa, Homo sapiens
MKDSENKGASSPDMEPSYGGGLFDMVKGGAGRLFSNLKDNLKDTLKDTSSRVIQSVTSYTKGDLDFTYVTSRIIVMSFPLDNVDIGFRNQVDDIRSFLDSRHLDHYTVYNLSPKSYRTAKFHSRVSECSWPIRQAPSLHNLFAVCRNMYNWLLQNPKNVCVVHCLDGRAASSILVGAMFIFCNKTPGPAIRLLYAKRPGIGLSPSHRRYLGYMCDLLADKPYRPHFKPLTIKSITVSPIPFFNKQRNGCRPYCDVLIGETKIYSTCTDFERMKEYRVQDGKIFIPLNITVQGDVVVSMYHLRSTIGSRLQAKVTNTQIFQLQFHTGFIPLDTTVLKFTKPELDACDVPEKYPQLFQVTLDVELQPHDKVIDLTPPWEHYCTKDVNPSILFSSHQEHQDTLALGGQAPIDIPPDNPRHYGQSGFFASLCWQDQKSEKSFCEEDHAALVNQESEQSDDELLTLSSPHGNANGDKPHGVKKPSKKQQEPAAPPPPEDVDLLGLEGSAMSNSFSPPAAPPTNSELLSDLFGGGGAAGPTQAGQSGVEDVFHPSGPASTQSTPRRSATSTSDTLRVGEGATFDPFGAPSKPSGQDLLGSFLNTSSASSDPFLQPTRSPSPTVHASSTPAVNIQPDVSGGWDWHAKPGGFGMGSKSAATSPTGSSHGTPTHQSKPQTLDPFADLGTLGSSSFASKPTTPTGLGGGFPPLSSPQKDQPMGGGWQQGGAYNWQQPQPKPQPSMPHSSPQNRPNYNVSFSAMPGGQNERGKGSSNLEGKQKAADFEDLLSGQGFNAHKDKKGPRTIAEMRKEEMAKEMDPEKLKIWIEGKERNIRALLSTMHTVLWAGETKWKPVGMADLVTPEQVKKVYRKAVLVVHPDKATGQPYEQYAKMIFMELNDAWSEFENQGQKPLY

SEQ ID NO: 874 - DNA, 38199 bp, Mus musculus
  misc_feature (1)...(38199): n = A,T,C or G
ctcagtcaaagggacctggataattgctgttgaatgatcattttggaacccagcaggagctgcagcggtaacactagagccctccctactagcagaggaggaatttccagggctgattttaggctgtttgaacactattgtgtttcaaatgaaaaggttttctcattagtttttcccttgtgtagggcaaaacctctgaatgaaatgaccagtttgaatcatcagttcctaacaagtggcagtgtaagccatttgggttttactgttaacaataagaaactaagaaaggcatcacagagaaatgttgctgtgtttctaacttagagttatgcaatccatcgggtcagtgaagatgtttatcagtgtgtactttgacctggtagtggcctttatttcagattatccgtgacccacgtagcaatgtacactgactctctgtataatcctctgctacatgtaccatcgcacaaaacatctcgggcatcaaatattcacagaagaaacggtgtgttcaaatattcaagtatatttaaattttagtcagaaagtcagtgcctcgtctttcttccctcctgctcatttcaacagtgtgtgacttactggcccagtatggcttactgcttcctgtgagctcagcccggcagcagcagaggcttgctccctctgacgacccaccgctatgagctctctacagggcaagcaggacagaaatgcggctgaactgattgaagataataatcatgataccatctccatatcactcaccttatgagttagtaaaagtgtggatatcattttttgtaactggtgatttttataaatgtccttgccttcatagtccttccagtcacccatctcacaaaatcttgaatatgcaattattcttcatgacacattactgcaaatagggttcccatttgaaaatgcagtttaatgtaagttgttattgaattgtgatttttttttcctggaaaataaatggaaaaaatatgaaaataaaccaagctgtgaaccttttatttcctgcaccttaaatttttacctacatttctggaaaatgtaatttcataattaaggaaaagatggtaggcccaaggtctagcaaaggcaagagctttcaagtgagaggaattcaattccatgcttagagacccaagcatgttacatcatagttgtaaatatcctcataaaaataaaataatataaaataaaatataaaataaaatgaatagcggggtgtggtgctagagagacggcttagctctagctaagagaagagcactagctgattttccaaaggacccaggttcaactctcaggacctacatggcagctcacaactgtctgtaattccagttcctggggatctgacaccctcacagaaacattcacgtaggcagaaaaccaacgtgtgtaaaataaaaataaatcataaaaatgttttaaaaatgaataacgggttttctacaacaacaggtctttaggtttaaatgaggtagcagctattggtcactgagcagatatcaacctagttggtagtagtcagtgggcaattctttcctgctcttatctttgtgtaaacagggctagggactggctttagagcccttaacaccttgctggagtcccgatgctaattaccgtcctagctccggcggaccaagagaacatttgtcaagcatcctgctgtattctgtgggcggcgtcctgtcttcgttcctaaataccttcaccacagcgcttctgcagcttcagtagtctggggtcctccgagggcttgaaggagcgcagcctgcttctgtaaccagcagagttttaaatcctgtgctcctaggtgcgtcctttaacgttctagttctcggtgagctacttctataaaatcattttgtgacagagttttgtggcaactgaacggctgcacagcatctgttagcagcgggggggggggtgaagagtgggggggnnnnnnnnnnnnnnnnnnnnnnnnnnnnnnnnnnnnnnnnnnnnnnnnnnnnnnnnnnnnnnnnnnnnnnnnnnnnnnnnnnnnnnnnnnnntcaggtctgttcaggtctgggttgtcctagaaaatttgcacgtttcccactggcatccctgacgtcctcagggggagaaacatgatacagggctctgggggcacatgttcacagtcagacctggcaaccgtacaaggcagcaggactgggaaggctccagaagacagagatggtgggattcctaagatggctcggaggcccatcgtgcaggggaggggcggccctggcagtgtttgaggaggtcaccctggagacgccctaggtgcccacagggactgctcgaccaagcgatgccggaggcagcaaccggtcttctgcagctctgctgaggacgatcccaggtcctggtggtccgacctgccacccagtgcagagcaggtatgtgcaggctcttggggacaaagcgtccaggaaaggaggctggggaggaaacagcctatgtgggggaaaaggcgatctcttcatccagcccaagaaaaccagaaaaagtggtcccaagtttggtcttcaaagcgcggtgagctcatctcatctgcaaatgctggtcgccaaaggtctttgctacttccctgcacttctggggacctctgaattcccatctgggttctctctagggagaactagtctgaaagccgagttgggacccgctaattttcgcgaactgacaagcatgggaggtacccttacgttaggaatggagcgcttagttcttctggaagggaagactcagtagaggcacgctttactattgagtaaactactcaattgagtagccgactattgagtaaagcaaggtgaatattccaaagagacaagcacaggttgtgaaggggtccggagggcgcaaagggctcctcctagaggaattcaaagtttatgaatatttatgagatagatagcatattcatggcgttaggtgataggttttttgtttttgttttttctcccaacttataataaacctgacctcccttttagggaatttcttcctatgatttctagaaagagccccaaagaaggtcaaaatcacaaaacaaggccatggtcttaaagtgggtacacacttcgatattgtgcatgtgtaagtcgataagctgatgctttcacttagcgctctgactatcaggagactccactatcataatacagctgtcgttctcttgggtaatagacctctggttcccccttaaggctgttttagtgccacaattgacctcatagctctgttccttgcaattttttttttaaactgaagtttcacgatgaaagatggggccaggttttccaagactggtagtctccacaaataggaagcaggcccagctctctgaggaactgggaactcccagtgccacctctccagactgtctactgtatccaagcacaaacgctcccaccacgttgcctccaacaccacgacagcaaatattaactagcgagcttataacaagattagattcagagaaaaataaaaatgttggcttgcagcgcaggacagcatctttctatagttgcccatctttccagcgtgactttctcccactccatcagttaagcatttgggctacaaattagtctccttgtgtgaatgatatacactactgaatagaaattgtcctatttccagttgtactggcacaacaaaataattacttacactacacattattgctctccgggaaatctcaggacccccttcgaaagggtcatacaagcagcggggtcctccgcctaggatgaaatctaactacaaaaactaaaaggttttcatatttttccccttttttgcagcatcagtttttcctatagtctgtgacaatgtcagcattggctaaagagaaactgtttcttgcaatgaagaaaagggggagcatgtgttccccaaataatcgtgagttccgacagaaggaaggtcactggcgcatcaaacagtgagtacctggatgtctagcatgttcaactgtgagcaatgtttaccaagagccaaaaacattttcctaggaatggaacaaggtagaaactggcaaatacggggctccactggtccttggagccataattaagatgaaagaggaggcttacattgatgcttagagcatgtttggtgctttcaaaactacctctcaccatgtaaaaaacaaaagcaaaatacaaacatctgtactgcagaccagccaccctcacaagccccttaaattcttctcaatattatgaaactgcatagttgtatagtttgtaatcatcatcactgatttaatacaaattttgtactatattttcagtctttatttatatcctcttaaatggctatataatattttatgaatgtgtagccaggatcagtttatcatccccacatgattggacattttcaatttgtcgtcttcttctttttcttcttcttcttcttcttcttcttcttcttcttcttcttcttcttcttcttcttcttcttcttcttcttcttcttcttcttctcactgttttgctttgcaaaacagaccaaggttgattacagttgtggaagacaaatctttttattatcaaagtgcttcagctggcgcccatgctcatttacaatttgaccaagccagctcagtcagtcaacatgttctccaggaagggagggaggattaaaaagaaaagagacaattacacaacactgtagcatgaccccatccagttctgaggctgaagcgggtttacttttttccagtatgcttttatatcattctaggtacatacgaagaatatggtcagtcctaaggcataaacagaggtgttaaaggaacaaacaaagcacagacagggtaggtaaggaacaaacaaagcatagatggaaggtcccaagattactgtcgtcagggtcttaacaagacccatcaagatacaaagaacacattcctcagctgtattcatcctgagcctacttccaagtcctagcccaaagtcagattcctgccaagtttctagaagaggccccaaaagcgctccacagcagttccactttcagtcctacaagtttgtagactgctaacacagtcttgtttttatttttattttttttacatggttggaaaactgagtataccagaacagaaacccactgcaggtcagaggaaggatgctacagctacagtaattaattcctgcttctgagcctcagcaattctggctgttccttcttaaaccactacaagtgttctcccatgcactctctctgtcttttgaggttggggcattggtgagtaaacccagagcctctggcacattctaccactgagcgacaccccagccctccttctgtgtttacctcatggctgctaacttgcccagactggacttgggctctctttgttcttccaaaccacggtagagaatcatctgaaatcagggtgtggtcaaatttaaagaactaactttgtatctgtgcaggaagggagagctcttatgtcatgcacagcacgtgtgtgacggccaaaggtcagctttcaggatgtggtctcacttccatcatgaggattaggggatcagatcgtgccaggtcatgagacttgtcagtacctgtctttaaccgctgagccatctcatagctctagtttgtccccagcaaaccacgattcttacagtattggtgattctctttcatgtgcgtcttcaactggtaggaaagttatgaaatattagtggctctctggtggagatgtgatttgacattgacaatgtgtctggagatgatacatctttttcttgaaaattaattgaaagcacctttttcaaaaactaatgtcagcattataagtcatctcctgaaggacactcaagacctgaacatcatctcgtttaccacccccctccccaccacacacatatacacacatacacacatacacacacacacacacatacacacacacacacacacacatcctgctaggtcctttcgttctttctgttttactgtggaatagctgagtctttcaggtcaagtaacttgttacaatggcaaacatccagtcccaaattcagagagaggctccagggaccccaggcgctgccccatcctccccactcctgtgggcatgctgccctctgtctggccgtaccgtgctctccctcagtgttctgtctggccccagccactgttggaaccctactccttgtatgaaaggttcccctgtcttctgctttccttccttctccctcctacctcttcaggaagctcagttcctatccttgaccacacccatctgtaacctgaggagccacttttctgtctgtctgtctgctcctccttttcttcacaggcctgtgtgtggtgggtttggtggtggtagtggtgaaggtactgctgctgttgtagctgctgttgttttgctttgctttgctttttgttgtttcattttgttttgtttttaaatctggctccctcaatacactgcaaactcacttgtctttgtagcagtagacacagtgagaaggaaagaaaagaagaaagagtgcgggtagatctaccggggatgtggtcaacgtggatttgttctttcgtcttgatttttatgtcttcagttctctgaattgtgactgatgtctaactgtcatcctgataaatgtgtgaacgcctcctgtgtcatgagaggaagactgagtgtgtattcagcgttgccactgtcatctgttttcagaattggatcttgtttgttcaagttataatttataatatatttttaatgttttctgaaagaaaaaggaagcatctctttaaggctgtatttttgctgctcagactggtcataaagtcgttagttattttgtgtagcttggatcaagaaggaccccactgtacccagcagcaaaataaaacctcttaagctaggcccccttatcctaagacacacatctgggtacatgactttccactctctgtttttatctaccccactgggaaatctgaacttgacttttcacctaaacaatttattagaagagaggtggtaacattcgctgaggttttagcatcagtctcagctctgcttccaggaagtttccaataacagggtctggcaagccatgaccaagcaccaagtctagtctggaacacggatggctatggtttcccagctaggagcggttatttcatagctgaaaacaaaatttaaaagagtacagttttgtggcatgcaaatattgatagaaatccaaatttcactgtccataaattatggattgtagagcatggcctgcctgctcaatgcagtgtctccagcggctttgcgatcgcagcagcagcagcgtctacccacagcagcaacagaaagcatagggcaggcaaaccccaaagtcccactcttggacctcttccagaaatgttggtcaacatcttctctactaaacaggtgcaggcatcatccccatttccaaataaagaaacagcagctcaagcaggttgagatgttaaaaccaccaagatagcaaatagaaagaagtcttttattacctgcatattttcattgcacagaaagtggcaaatccgtgtgtaatttgcacatggctcccttgttcactgagatcttgtgtttttcacgcatgagtccaggcaggcattcatgctgatggtttacttgctggaacctcaccctcaggtagacattgaacagcatttgcacagatgctgtcatcactggtccttaaaatggaaacagaaggcacaaggttgagtcactttctccagctaatgcggcaagctatctggacatattagctccaaagctagcagctctactgtgggtttgggcaaagaacaaagactaaacggtctttcttttgcctcaaagcaaagttctcacgatgccacagaacaaaaaccatgtgtggaccccaccattccccacagaactgtattgaaggcacccagcacagcaggtcagccacactatgttgacttccctgtgttatttactcaagatccagggagcctctagtacccgtcagctactgtgtcacgtattaggcgtgcagaataccagaggggtctagcgtagagatcactgctgttccagcaaactgagagctacttgggaactccttcacagtccactgggtatttcagcgaatgatggaaaatgcaaccctcgtgaactttgtgcaaacctgcaaacctgctcaggtaaacaagcagggccaagtaaattgacatggactaatttattccaggattccaagccatgagcctgtgcatcagaaattaggttgggctatcctttctttggatccctgatgggaaaggctaggagacagaataccaaagggatagcatgtgttatactgaagtttgcatcgagctgaaatgcagcgtagtcccagaaagagagagagacagagagacagagacagagagacagagagagtgagagagagacttggagaagataaaatgtcactttccaagtgaaaccacaggaaaatgtgacagcctcgatgtgcttctcagacaaaatatatatattgaatagaggaaattctattttacctaaagttatttccataaatggggaaatgatgggggtttttgtttttgtttgttgtttgttgtttgtttgtttgtttaagacaagctagcttgtaactcaatatgttgatcagactggcctggaattttcagtaatcctcacaactgcccccttagctctgagaaaagagccactatagccttggatttttgagggcttttagttcttgtgtctgacagatggttttagagaggaagcaggtctggtacctggtaccatttacacaggcatagtccagaaggaaggcagagaatgggaagctggaaagcgtaaagcaggtagaaaaaagcataggagagcctgtctggactgcgagtaaggaagccccgcccccacgcactacagaccaccagcactgctgccaccgccccatcctctccttgaatcttgaatccatacgcctccacctcagcctcccaagcgttggggtcgtaattacacactacgaatcccaacacgaaaacataaaccacaaaagaaaactaaaacttttttggtaagtagaacatcaacaaaatgaagtattttcacaacgtatataataatatagttagagaactgctagaatatctatccacaggtatagcgttgcatgttaacaataaaaggggaagccagttttaaatagagtcagaggagatggcagtgcccacaaggggagtctaaaggccaagcagagtaagaagagctacacaagcacactggaaaaccagagatgcgtaacttagagcaaggtgtcttctacacccgtgctgatagcaaaatgctggcagacagaatagcaaacattgctgagggcagtgagaataaaaatagatccagctgtttagtgcacacatcatctggacattaataatatataaataaataaaataaaaataaaacattaagttctgtagaggcagacagcttaattcctttcatatctcctagtatgacatctcaaagacagaacagcacctgcgcacaaaactgtccttcatggactattttgatcagtgagtgagcagttattattgcattatgtgaattcttaagtaattaagtcttttttgctctaaaataaattctgcttacaagtccattatatagtaagtccggagtgacttgtaagatgaatttacaacctaggaaaagtgtttattcaagtgtttggtacaaagcaagctttattttagctttcttattgaaaaagtccatttgcatctattccaaaaacgaaaggaagggagaagaaggaaggaagaacaaggaggagagtaagggtttcctctgcactggaaatatggcagggctggccacacccctcgttaatgacgtcacagtcatgtgacatagccaggcctcaaacacatccagcatcacctctcctgattgcagtgtggctttgaaaccatgcctccttcaggccctgcaggagatgtctatcgtctggccttgaccatcagttccgttcctctcagatgaacagtagcccaccacgtcaagagctggccctgcgcttttacccacacctatgattgttctgccagtctcctgtgctaggttttacatctgtcagtccagggcttgactgttcatgggaggtaggtatattctgtgtccttcgaaaaacacccttactcttggggaaaaaaaaaaagcttcccacaagacgataccttctactgttttctcatttctttaatttgtgaaggttttcaacttctgtttccactatagccttctaaaaagataggccaattgggataagatatcatgaaactgcatgacttccacaaagacgcaccatttactgctaggaaatgagctggcatgctttaggttttaaacataatcagaaggggaaaaaaaatccatagatagtcttagtccccagttaagcaagtctctgtatattgtatctttctctatatatcatattccaggagcatatttaattttaaatgcatcttttgtgtgaccatcactctggactctgacacatcataggccataaatttttgtttaaaagcttttttaaaaattaaaaaaaaacaaaaacaaaaaaacccacagaacctatagccttcttttctctgtgcactgcaatgtctatctatccactagagggcagcacatgactttaatgacgcgcttccccatccttcctgaaggccctcttatggacatgggtggccaccagttacaaagcccaggaatttatgtttgttctcaacagtaactcttatttcaagaaacctgaatacaattctgtcctcaaaagtagctcatgtacttccaagcacagcctggatttttacatgaaactatacatattttgattttaaaatacctttatataagatatacttctcttttctcttttcccctactgtgaatgtgtttgttgaatgcttacaccagtttttagatcagattctcagcacatgcctgatgccagtacttgaggaacaaaggtggggaggatcacagagagttggaggccagcctcgtctaccgagcaaaccccaagccagtcagcactgcacagcaagacactgtctcaattaattaagataagattgactgcagcattctctaggcaatgagactaggtgtcggaaaggattagctcggcaggttggatcacagaactggacttcatccacttgtagtgttgggacatgtagccaatatgtttattgtatttatgcctgcagttgaaagcttaaatgcatttaataagcagatcacgtgcttgtctttagcaatacaaatgcctcgagcctctttgtgtaagccagtgttctggacttcattgataagcccatgcttttaaaatataggaactcctcaatttctaaaaactgtaccaaggggctagagggataactcagtgcaagaaacactggctgctctttcaaagaaccagggtttgcttcccagcacctataaggcagctcacagccccaagtgatctgacaccctcttctggcctctgtgggcaccaagagttcgcatgactcacacagacatacctgtagactaaagatccagctaccaaaaataaaaataacacagaaaataaaagtaaaaggaaaatataactagcccatattatacttccatgtttcttgctcatgctgcaaccactgttaatacctcttaagtcacccatcactcaagtgaggaatatattttaaattttctgtattctctttcttttcttttttttttctgggtttctctgcatagccctggctgtcctggaactcactctgtagaccagactggccttgaactcaaaaatcctcctgcctctgcctcccaagtgctaggattaaaggcatgtgccaccactgcctggctccatattctcttccagctctccatgtccagtctctcacatgctaacctataactatcagaccttggctctttaggatgagtaaggggcttgcttagcctcagggaagccctacctcctatccttgagttatttccttttctgttgctgtgctaaaacaccttgatcttatagaagggcaggtttatctgagtttgtggttccagaggggtaactatccatcatggcacagacacatgggagcaagcagcaggcacagcggctggagcagggtgctgaaagcttacgtcatggagcacaggcacagagcagagagaacaacgtgtgagtatggccttagctctcaaagtcccatcagcagtgacaggcctcctccaccaaaggccagacctcctcaacctccccctaacactgccaccagctgggggccagaggttcgaatgcctctgagcaacattctcattcaacacactacagtcttcaatctggaaaagaaacaaacataaacacgaagctcaaaagtaaaaaagaatcaggctggagaaatggagcacgcactggtctgccagaagagccaaactcagttcccagcacccacatcagctcacagccaccttccactgccgttttagtgggacccaatgtctccggcttccatggtcacctgaggacatgcacacacacatacatacatacacaaacaccactttaaaaattataaagttaaactttaaaaaaaaaaagcttcctgaagttgtagtccactggagacatggtcagccttgaaaaggcaaaaagaaagcaagaggttacccaggcattttcctctctgtgatcaaggcagccaggcttctagtaaagcagcaagggtcttcgctaggcctcatctcccccaacaaaactgacagcaagctcccttcacacagctgaccccactgatcttctagtggagtctgtttcaacagtgtctatcagtaacatctaatgttcctggtaataccattttaaaacaaatacaaaacagtctcctaagccaaatggaatttttttcctacataaaagaagggcagttcagagacctaggccactgctgttcttatccagtctaggaatcaagcagcctctgggatcctgccctcctccgtcactcattttagtcatggaggaaactgaagaccagctcctactggttaacttacgtttgtcggtttggggttttcttgtgttgttttgttctgagaaatcgttctcaaattcctacccagtcagtgctggctgcatcacactggtttgtaagccacagaacttcagctgcacaaaaagggaccaagaatttgccgttcttttagtcagaaatgttcccaccatttagggctctgttaccaagaaaggagatgagcaacactggaaagaaactgacaatgcctaccacatgttaattcaaagttccctgataatagtgacatactgggagcaatttaaatggtctggagaagaaatggttaagggaaatgcaaaatgtttgtatattaagctaatattttaactctgactaagatgcagtgtcaagcaaaataggattatgaatgtaaaatcaaatatctgaaaaccttcttttaatactaacagtcattacctaagcactctggttagtaaggtaattttactctgcacctttccatgtgttttgcatgttttacaaagagcatacagtatttacatgattaccgtgcaaagaaaaagacactagaggcttgggagaagcccagcaggtaaagcccttgctacacaagtgtaagaactggggtaagccagatggatgtgagaactaccttgtaacaccaggggaccggcagggaaagcaaagaagagggacgcccagaacaagctggctagccagcctggatgactcaggaggcttcagcaaggtggagaggatcaagaatgacagctgacatcaacctctggcttctacatgcatctgcatgcacacacccacacacaaacacacgcttatacctacacatttatacactcacacattcaaatacacacttatgcacacacacatacgcctatacatatacacagttacacactcacaaatacatacagatgcaaaacaagactccgagaaaccatctttaacaattcaaaaacagaccagcctctaaaacttctaatctatacgtcagacttcaacccctggtttttgaaagttccccagtagacgtcattttcataccaataatagcacagggtgcactggctagtagactttaatgaccctaagaacagtagcaagagtggttgttccctttgtattttaaagccagctgatatgaactgtgcatcaactctgtttcctgtgaattttcagtatgataccagaagacagcaaaggcttacgccaatgcctcgtgcatgctgcacactgcacacacgtatatctgaatcgcagccacaacttccactagtcattgcccccttcttattctgtctgctgtaagcacacattaagcttttctactgccagatagatgaaatatttgaaatcaaagacagccttccctacaggtgtgacagtaagtccttggcctcgtttcttcttctctctaaaatggagagaatgatgacttctttacagcatcaaaggacgttgaaaagatcaaataaaacagctgagaggaggtattttgagatgcacatgagtaacgctaggtacatagactcgtcacagagtcacaagcttctgcacacgtgtggtcgggtttcataggcagaagccgactatcatctctggtgctgcccacaacacctgtagccacaatggcctaactggttggctgctacttcaaacacagcaggaaactgagaaaagcaggtgttagaaggaagagggtggaatcacccccacaaagatgcatcctgacaaaggcagccagaatggtaccatgctcttggatattgtgagtgaactggaatttgtccccaaaactatattttactaaaggacttttaaaaatagaggaatgtgatttttctcaaagtgtcaggttgcagatcccactaatgtcaaacatctgcaaactaaatattttaaacttctcacagacagaaaaagaaagaaaaaccctaatgactaaaaacaagtaagctggccacggtgtacgcctttaaccctgaccctcagaaggcagaggcaggtgacctctgtgacctatatagcctggtctaactctttcttattaaattagagaaaaaagatagcctttacttggagaaatggtcactctgaatacacattcacacccataaatacaaatacacacacacacacacacacacacacagagagagagagagagagagagagagagagagagagagagcattgcctttgaaatggcatctatcttaacctccatcttcacagatggagggaatttggggtagaatgttgtagctcactagtcccacttggttttcgctgagctgggttgaattacacacagagcccatcaggggctcctccttgcttgggtttctggttccacacctggatcagatcagattgccctgaagaccaatccttttcaatgctaagaaaaaggtggcccgcactgattgacttcttagagtttaggtgacttgcggtttctctcaccgtgtagagaggtgagtgtctcatttctttttttattctgaagggatttggtggaacttcccatgatgatctttttataataccctttgtctgtatggatttgtttcccaacacactaagctcctttatacacccccaagccccatttgtgagctttgtttactgtgggggatgcttttgtgtctttgttaggggactccattgacaatggcttttgaaacactcactgcactatcccatagactcaggttagcacctgctctgacttccacatgaccctgagactctgctagtaacttctctacagctcagtagtcccatctctaaagtgtttcaggctttaaataagccattgggccacttatagggttcattagaaacttccttacagtagatttttcatgtataaatgcacttgcttaaagcaatgttttgtagatcttgtggctaatcactaatgtttactccttcggtcttagttccctcagtaccgtgtcccacgcggatgagcccagccagcgtgatgaatcctctcgcctcacagtccggatggaaaacacctaccagttaggtgcgctgctttgtcattcatccacatgctcaaaaccttgacttcagtgaccaatgtgggcttagctgtagcctgtcattgtctccagtcctagacaagggaccttaatttgagaaagaaagtgggaggccaattacagagttacagtgttgctttgaaaacaaaaaacaaaaacaatgaagcaatacttacttcctttaaaacaaaacaagtcagggctacctaaatctcaaatgaatctctggataccacaaaggtgtataatatgggattgaattcaggttcactgggtatttcttggtgaagttactgtgtgtgtgtgtgtgtgtgtgtgtgtgtgtgtgtgtgtgtgtgtaaaaaaagtgacatgcacggatgtttatccttcaaaaccaaccaaggttgttgatagtgtaggaaaaaaaaaaaaaaaaaaaaaaaaaaaaaccctcactgcagaggcagcccactgcagtcccctgttgacagtgctgtttatctactgccattgaggtttggggtctctgaaaacaaagggtttcacacctgccctcatgctcccaggtggagtccacttcaaattccttttcccactcctgtttctttacaggcctacttgttttctttaagtgcgtacctgcctatgattatctgaattcagatataattgctgccctacataaattccaccgaggcttaccaagaagcaagaagggactctgtgggccagggtaattccacctgtggcctgttaaaacccaagaaaattataaacctaggccttgtagccagttttctgcagcgatcccaataccatttgagtaagaaacatagcgtccctctctgtcttctcgtggacagccctcggacgtcattctgagaagttgtaattacttagataaaggaggacaaacacactgtaactctagatgtgttttcgtgatgtgcatattattgtggcggttgactgacacactcaatccaatactacgggctccaggttaggctgctagcatttcgcactgctgtgaggcagacagtaaaggtccctcccatccattttgctttaattgtgtacctaagtctggtggctgctcttagcttctccagtcagcagcctgaatttgggtcaagttttctccaatttgcagtttgtttgtttgtttgtttttgagactgggtttctttgtgtagtcctgactgtcctggaactagctctatagaccaggctggcctcaaactcagagatccacatctctgtctcctgaatgttgggattaaagggatgggctacccctgtctggcttatcaatcaaaggctcttagtcattggcagcccatgcctttgagtcaagtgctaggaagaaagacctggaatccaatagcattaagataaagcagtttaaatgggaatccctgtgtttctttcatagttttcccccacaattacttcaagcaaataaactaattctacgtttcagaagtgctgatctttgcataaaggcgattggctgactgtcaccctcactccccactctcctggccagtactacatcaagttgatataagacaatctttactaaaggctcatcagtacctttcacaaggcaaataaaccgaagggcaagtagaattggaaatacagtttagttattaatagggctgattggctgctttcaaaagcagactcaatctagcacaaagaccttttattattaagactggagaggtggttctgtggttaagagctcaccaccactgcaccatctaaacccaacttatgtgtgcttatccttttatctaaaggattacagctaccgtaaataaagggacacatgaatatagttcatgagggaaattagaaaagggaagctgtgtttcttagaataaagcaccacttgacccttgctcactaagcacagagaggagagaatgggagaccatagcagcagcctatgacagctgctctgtctgaacgtggatgctagtttagatgtctcccaggaaggtgatatttaagcaaagcatcctgaaatcatggctttctttgtgtgtaaagaacacaaggtctacaagtcgaagggatgttctgagagccggtgaggcggtttacgttagttgcttctcattccctggaactgctgctgagagggacagactagagccttcccacagatcactaacatttcttgttttatccaacgtgacttccataaataatagagtaagttttgcactggactttatttctagagctcaggttaaatttaggtagtgggtttttttttgttttttttttttttaagatggtgactatgaacatcacactagtgaagagtttcaatcagattcttttcttttttttttctttttttgtaaagatttattttatgtatctgagtacactgtcactgccttcagacataccagaagaaggcatcagatcccgatacagatggttgtgagccaccatgtggttggtggaaattgaactcaggacctttggaagagcagtcagtgttcttaaccgctgagccatctctccagccccagtttttcttgttatactatgacaaaatagcatacagaacaatgtaggaaggaaggaaggaaggaaggaaggaaggaaggaaggaaggaaggaaggatttctttcggctcacagtttgagggtgccctccatcatgataaggaaggcctggcaggagatggctgttggttcatatctgggcagatcgattagaaaagatagacaaaagtgttccctttttattcagtctgagactgtagccactaggatggtctaaccacttaaaataatgtcctctccttaaatcatagcacaaaataacctaaaataattctttcacatctttgttttggtctcagacggcttctgctggcctcgaattcactacattgccaaggacagcctgaagtgctgaccctctagcctgcagctcccaactgtgggatgccaggcctgacttagggtaattcttgttatccaagttaggggaaaccatggcacagacagtttactgctttcactaggttttgttttgatttttaagtttttgttcttgtttttcagatcttttgaaatccataacattttcttccttgggagggggcagggggggatatctcaaaatgaaggggacaaggtttgttgattgcatagttgtcactgaacttcaggagcctgccttgcctctgcctctttgagtgtccacatctgagtctgagcaaggtgacaggtgattctggctgtgtaaggaaaaggccctaggatgtgtggagtgaggcttcagtgctatatagaaaaatagttttagagatagaatcacatttgtgagacaaaaggggatgtagtgtttgaaagatgttggtacagcagaccatggcagtactgggaaccaggctccccctatcctggatgctctttctgtccctaaggtataccaactttcttctcctgctgtggccttccttccaaccccggagcaacttggcctctggcagttcccaggggttataaaccacagcttttgccataaggaagaggctgacttggtttttttgtttttttttaatccacttctactttgtaataaagctttaaagacagttcttttttggcctgtctagagctgtgccacccctgagccaatcacctgtgctctgcacttgggctcctgagtggcagtggtaaatggtccagtgttccatgactacaagagggagagaagctattccagcttggcagatgctgctcccatgggtgggaggggacaggaagcacggcactaaccaatagatcttcactagaagaattacccactttctgaatgtaataataaggacaggtactttaatgtaaggcaaaacagagtccccggggaatgatattggccaagtaaggtcatgtgatgtgagtgcttggtaagatagggtgtctatctgaatgacataatccatttaatttagtccacgatagtggcataatcttttttttttttttttggatattttatttacttaaatttcaaatgctatccccttccctggtttcccctctgcaagccccctatcccatcaccccttaccctgcttctatgaaggtgctccctgacccacctacccactcctgcctcaccactctagcattcctctatactggggcatcaagccttcacagggcctcccctcccattgatgccagataaggcccttcagctccttcagtccttcccctaacttctccattgggatccctgtgctcagtccaatggttggctgcaagcatctgcatctgtattggtcaggatctagcagagcctttcagcagacagctgtatcaggttcctgtcagcaagcacttcttggcatcagcaatagtgtctgggtttggtgtctgcatgtggggtggatccccaggtgaggcagcctctggatgacctttccttcagtttctgtttcactctttgtccctgtaattcccttagacaggagcaattctgggttaaaaatttggagatgggagggtggccccatccctcaactggggggccatgcctaacctctggatatgttctccctcccctttgtggggtatttcagctaatgtcatccctgtagggtcctgggaggctcttgctttcctggcatatggaactttctggttactaccccaaattctgcattgctacacacctctgttcagtttcctgaccctctacatctcctccatctcctctcatacctgattcttccctcctttttctgcccactctatactcttcctcccaagtccctctcatcctctacttcccttgattattttgttcccccttctaagtaggactgaagcatccactctttgatcttccttcctcttgagcttcatgtggtctgtgagttcaatagtgggtattttacgctatttgcctaatttccacttaacagtgattacataccatgggtgttcttttgtgaataagttacctcactcaggatgatatttgcctgcgaatgttatgaagttgttgtttttaatagctgagtagtattccattgtttaaatgtaccacattttctgtatccattcctctgttgagggacatctgggttgtttccagcttctggctattataaataaggctgctatgaacatagtggagcatgtgtccttcttaccagttggggcatcttctggatatatgcccaggagaggtattgcaggatcctctggtagtactatgtccagttttctgaggaacctccagactgatttccagagtggttgtaccagcttgaaatcccaccagcaatggaggagtgttcctctttctccaaattcttgacagcacctgctgttatctaagtttttttattttagccattctgactggtgtgaggtggaatcttggggttgtttgagttactctagtgtctgtctttgtcactgaggtgggtgtcatgtatgcagcaaacgttaggtcctgtggggggaattgagtccattgatattaagagatattaagaaaatttaattgttggttcctgttatttgtgttgttagaggtggaattgtgtttacgtggctaccttctttttggtttgttaaaagaagattattttcttgctttttctagggtgtagcttccttccttgtgttggcattttccatttattatcctttgaagtgctggatttgtggaaagatattgtgtaaatttggttttgtcatggaatatcttggtttctccatctatggtaattgagagttttgctgggtatagtagcctggactggcattagtgttctcctatggtctgtatgacatctgcccaggatcttctggctttcatagtctctggtgaaaagtctggtgtaattctaataggtctgcctttatatgttacttgaccttttccccttactgcttttaatattctctctttgttttgtgcatttggtgttttgattattaagtgatgggaggaatttcttttttagtccagtctatttggagttctgtaggcttcttgtatgttcatgggcatctctttctttaggttagggaagttttcttctataattttgttgaagatatttactggccctttaagttgggaatctctgctcatttctgtaccttaggtttggttttctcatagtgtcctgaatttcctggatgttttgtgttagctttttgcattttgctttttctttggctgttgtgtcaatgttttctattatatcttctgcacctgagattccctcttctatctcttgtattctgttggtaatgcttgcatctatgactcctaatctctttcctaggttttctatctccagggttgtctccctttgtgatttttttattgtttctatttccatttttagattatggatggttttgttcaattccttcacctgtttggttgtgttttcctgtaaatctttaagaggtttttgtgttttctctttaagggcttctccctgtttacctgtgttctcctgtatttctttaagggagttatgtatgtccttcttaaattcctctatcatcattatgagatatgatttttaaatcagagtcttgcttttctggtgtgttgggggcattcagggcttgctctggtaggaaaactaggttctgatgatgccaagtagccttggtttctattgtttatgttcttttccttggctcttgtcatctggttatctctggttttagttggttttgctgtctctgagtgtggcttgtcccttcctataagcctatgtgtcagcactcctgggagaccagtttcccctgggaggaatttgggtatggagagttgtggcacagggtcagctcaggggtgcagatggaaacctgaaggatcctgtctccagtcattccttggttcctgtatcctgagggctctgggtgggcccttcttgggccaggaatttgagcagaaatggtgggtttactggtgctcccaagtgtgtcagcactcttgggaggccagctgtctctcagtgggacttgggtgtagagaactgttacacaggtcagctccaggcctcatcagatcatggcataatcttttaatattttcaatacaaaggagaaagtcaccttcatctgtgacattttacaataggagtacagtgggaatcttttgaaaagtacatttattagttctctgagcatttcatcatgcactgtattgcaaaccccaactccttcccctaacctcttcctagatccaccccaccccaaaccccaataatccattgattgtaatacgtgttgtctgtgtattcctgtgtgtgggaccatctagaaggagcatggtggacaagccaaggcttgttcctcccccagaagccatcagctatccacagctacccaggtaaagataggagcacagtgggtatcttatacaaaatgcacacagagaccggagggcacccaagcttgctgtagaggaatttgtctctgacaccgtatctctggttcctgggatcaggagcaggcccagccattctcagattggtaactgcttgagatttctgctgagcagatgttagctgttagagtgattcctatcatgtttcctttacttggtaccgacctgattttcttttttttttttcaaagtcactcagcccaggctggtctcatagtgactatgtgtcctaggctggccttaaacctccacagtacttacattaaaagcatacacctccatgtctgacttcctagcctgatttaaattggactaaatcattcttatatcatctaaataaaaattctcttaatgagtctcaggaggctgacctcactggattgcagtcatacactgtaacccactcttgagtaaagccaatgaaacttcagcaaaaatgaaaggagtgtaaggcctgggggatttaccgccatggaaccctgccatggcctcatctcagactggttgcatctttcaggcaagggacagagcgctcttaagggagccatttccattcagccacggtgggatctagtccaagctcccttcccggattgctcaggcctagggtggcaggcttctactggtggaaggggacaaccctaccgcttgtaagttccttttctctctcagacctccccaaaggaacttcattaaatcctcttattataatctattagtgtttattcataatgcctatatcaggcagaggctaaggaagcaaggtacaccatcgttaggacaattctaatagataatgttaactactaaaagagaattggatagcattcttgattcctctgtagtaactcagagattacccagaccctagacaccaagccttggcaccttgagtatgccaaatagtggcaagggcagataccagaggctaatgcaggtaattccaggggtactagagagcagcccgcttatccaaagctctgatctgaatatggataaaatgtggtcccagctctgacgctgtctccccatctgtggaacatatataacagtgagagtttcctcaaagatctactggaagatactataaggtaaatacgtgcttattacagtccctgacacacggactgtggtcagcaaaaggtaactactatttgtgtagtgatttttatctataaaatgtttaaatccacaaaacccagaaattattccttggcatgaagttagactctgaggaggataagaccccatcatacttaccattgctttcctcctttttaaattttttgaacagtttattatttttattacatttactcctgtgtgtgcatctgtgcatacaagcctgcaaacactgccacagccctcccgtggaggccagaggacatgtggaagttgtcctctcctccgtgtgggtttcaggaatcatcaggtttgtcagcaagcacccttatcttctgagccacctcactggccccgatcttgcttctattacaccggagaaaattgcagacatgcctcacctgttttcatgtatacagaacagcaaaagggacccatgtgtcttgaataagtgagaggtgttttgtacctggggtgagatttgagagaaaaaaaggtgcctagaaaaggcatttgagccagaattgaaacttgagtgaacatgtcttaaatgagtagatgggggaacacaggacagtactccacttgaaagagcggacaagggtaaagacatacacatatctctttttttgtttgtttgttttgggctttggttttttggtttttcaagacagggtttctctgtgtagccctggctgtcctggaactcactctgtagaccaggctggcctcgaactcagaaatccacctgcctctgcctccgaagtgctgggattaaaggcgtgcgccaccactgcccagctatatgaccggtggggccatgagactggagcagcatgcgcttggggaactgtggtggctggaacaaggtcacaggactggtaggcgcacataggcagccataaggagaatgccattttcaggactaggctctccaagcaagttttctggctgcagtgggagggatcagagcagcgtgggtggagtgtaaacaccgaggagccaattagaaaggtgctgaggctttgaagtcagcagccacctggagaagttggtggtgtgaactcactgcattcctgtgggagcctggtaaattcggactttattatcctctatccccaatctctccagaaaagcctgaccctaattgtgacttctatcttccttagctggaggtcacccagatgactaaagggtttcatggttcagtattctttttatgaacctataaggtagatgggtatgattagaaatgacttctaaagaaattccgtgtgcatttctaggtcccaccaaacctttccccgtggccactgtcaatcatattttggaagatgtactaactacctacctacaagaagcacaatatgacccagagttctgcagacaaatgactaaaacaatttctgaggtacagtgcaatttgcccagtgttagctagaaccacaatatttgccggaagatagaaaatttcatttcattttcaggatcagttcaatggcacacctatattttatagaaatagttattagatcatatacttagtctgtgcataggtatatgtgtatatgataagcctttgtctaaaactatcattgtgtgtgtgatttataacaaatctattgcttgtataaaactgttccacttctttttctaaaacaagatttatatttctacttatgtatatgtgcactcatgtgtgcacacacatgctaacaaagtatgcatgccacatgtgtgtgtaagtgccagggaaggcagatcccctggagttagagttacaagcaattatgaactccctgctgggaatgctgggaatgaaacagtaagagcagaaagtgctcttaactgccgagccagcaggtccatgccactttaaaaacaaaaaccaaaaaaaaaaaaaaaccaaaaaaaccatcctatacatttgtatgatgtatatgtatagtatgtgtgcatgcttctatatgtgaatgtgggcatgcacatgtagaggtcagaggacaaccttgcgtgttagccttcacatttcacctcaattaagagtctctactgttcaccacaacatatgccaagttagctgggattgtcccatgtctcccccatttccctgtaggaacgctgtgatcataaatgcccactgttatacctgacttttacttgggtttgggggacttgaactcaggtcctcacacttgtatgagtgttttacccatgagccatcacctcacccaaaaactatttcccttatttttggtaaatacacattttaagggctgttttcttcttgccacaggaacttttttgagtactgttgattgtacgtatcgaggtctttaaatacattccatgttttatcaactacagtatattttatgatactttcttctactttagtttttatatctaactctgggataaatgtttatgtctattatgttgtggaagatttcggaagaatatctttccctcattagtcatgaaaacaaaaaaataactctagtcatggcgttctttaaaaggaagccatcctttacagactttcaaaggatgaaataatcacttgaattctgtcctatagatgacaagctttctgcatgtcttagaaaatgccgacttattgctaatattgttattttgttcctggattcctgtcccacaagaacttaaagtacttaaaggaaagtttacctatggttctgtaagatactgaaaatttctacagagtaccgtgctattttctttaaacattttttaattcattttttaaaaagttagcctacaaaggaatgaacttcatatagtatttttacacactctctcctctcccattgggctctccctcctccttgccctcctccccttggtcccctccatccttcccaaattatcctcccttctgcttttatattatatactgtgtttaacaattttgcgatttaccctttattttttttatcattttctaggttattaagacccaggtcaaggaattagtgattccgagatataaactaattgtcatcgtttacatcggacagcgggatgaccagagcatagttattggcagcagatgcctctggaatcctaaaagtgatactgtctcgtcctatactttcaaaaattctacattctttgcacttgcaaatgtctatgcagtttacttcgagtgattgaaagtggtccttgtgtgttaaaatcatgaaccaggctgtgtgtctctattcacaaaagttctactggcaaaacctgtgggaaagagacaagatgaagatttcaaacaactggaagctttggtcgctctcgtgaggactggtggagggggacgggagcctaagaaacaggtcctgtttgttcaaagcagaagtcagtgccattcacataaatgtagatgctgacaaaatatcactctgagtgctaattattttgatttctcttttagttggagagctagaatttcctggaccactttctggtaaacttctagaaataaatggcaacatactctggatatataccacacaggatatatccacataggataattcaacatgacacacaaaaatggtgaatatgaataggccttagtactgcatataaaataataccggttttcattttacatttaataaattgagcagcactcattagctgcaattactgttacatgtacctgacagttgaaagtactgacatagaattaatgatttcgtaataattaccatggtcccgtggggccactggctaaatctagacgctcttgtgggttgccagcactttacaaaattacaagagaactgaacattggctcttcaataatggaaactataaagtggatacaggcttttaaggacactaaagtagacattgtgctattaaatatacatgatgcttaatagtaaatgtgcctgtagcacctaataccatgcattggaaagagacactgcctttaaatacacatagcccatgtgcttttgactagtttttcctgacctaccttttacccagaatacaaagctggcagcttaacaaataaaacatgtgtgtttgccattttgttcctctgagtttagcactaaaaacgacccagtgaggtttctgaatgtatggacattgacgtttacagggctgaaatagctcttctgttggcggatgcctcttgtagcatggatcgtttatctttatggggctttcaagtctttgtgtgcatgtgaaatgacgctgtgccattgctctaggatggcaagtcatctgcctagaggacatttgttaaaggtcaaacacaaattgttcacatatggagagaattagcgacgttataatcttaagggggaaattgcatgtaattcgtatcagaaagattataacaaatgaaaatcccagtcaatgcttcataatttcaaaatgttttgatgtcttacttttcactaaaaccaaatgtagtttttaaatgcattcctgggctttttctgagagtgctttagggggtctacgtagaataatgaccacatccaggactcgcctgtctccaaaccccagttttgcatctggatttgattatcagaggaggaaggaatgagaggtccgcacttttgtcaacggtttctttctcagacaatggctgtgaaatcgcacagcagcatgggaggaatgagtcaattgaagaaacagtttttacctacagaaagtctgctgtcgagacggcttcctctcagtgttctaacttctagtcagtagaatttctcactgttcctccttggttgtcttggtaaatagaaccttaaaatacagaggccgttcgaaatggaaaagggagtttgcaggcctaatgttagcatgtgctgtaaccgagattagttcagagatgcaccccagcagtggcagcagcataggagtagagagtaggaactcacacacacagctcattttcaggagagtgttattcaccactcaaagcctggagacaaagaaacagctcccctccatgagtggcggccttcccactctcccactgtagaacatcctgtgttctttacctgcaaactcaggtctcacctactcggatccgtctccatccatctccatccatctcctccctcccactctcctcctctgaccactcttagttcatctctcggttgttctccagctcttaagttttattcttccctatcaatgaaatctaattctttacttacaagcaagactcgtgagcactgtgctacccaacttccaactgtccagaaaatagcaatgcagatctgaacccttgaatactagagtcttaggggaatgacagcagggcacatctgtaccccagaactccagctgtggagacaggaagattcccatgtggcgacagcacagattagaacatgttatcccaagagagatccagaatgtcgttatccagtgaaggagcgtctgggaggctgtgtgaaaggaagtaatgactacttcttgactgtgatggaggcatagagaatttcaaaagatgggagaatagaggaagaaatttacaagggctaagagggcccacaaagatggaagggtgctgtctcctaaaggaagtccactcagaccatagtgagccagtagcagcatttctctaagtgaatagcactaagtgactctaagaaggcatgtcaaatggggtatgcagggaaaaggtctgcatgattaggcaaaaggaggctaaatcaattaatacacagagctgttgacatttcaagtcctgggtgaatgtgaccccccacggtcctggcaccttaactacattactggttttacagaggagcagcttcccctgatgtgataatgataactctggtgccactggctcagggttgtgtaggattaactacaagcctgctgaatggttcacagcttaatgtctaagagaagtacttgtggtcacaactgaaagtctgagcatctagagccaattgcatggtgctgttctgcaggaagaagccatcagtggaaatagtttgaagaataaaaccctgagtttgattttgcaccctcgtttaagttgattgtgagacatttcggccacaggcaactgaacaccgagctggaacatcaaagaaagagatttagacttggcagtcatccaaaccgcaccccccccccagacctccctcctccctcctgtcttatgaaatattcactagccaactctccagcaagtatagtcagaaacagccagctactggctttaccagaaacctccccaaaccaatagggctctactggttatatgcttctaccttcctcttcctcttccttctcctcctcctcccttcctcttcctcctcctctttttctcttcctctttttccttcttcactaaaacagtttcttatatcatccctttctgttgttagccatcaaaagaaatgttaagttttcctcaaaaaaataaccttgcaattccagtgcatatgatcaactgcagtcattgtttgctaggtgacttttcagacagcacaaagtaggaaggaggtcaaagtccaacatatcgtgggttcaaagacgaaatgctaagtcaatgaattcatttttttaagtcaggagaattagctagtgtgtgggagtgatttttaaaaagtcaacaaatcagacatttataaattaacactcctaaagagtgagaactctcctccttgggacatcatctgacctgtctttctacgtgctctaaaaaataatagataaaactcaccatccaacagttatctggttgtcatccctagtctcgctgatgcccccatcgtcagcaatcgggttctcatccaccaatctggggctgtcacaagcactcaaatgttctcccgggtcaaatgtgtggaccacttcacccacgtggcacctcggctcttttgaagaccttccttctgaggggctgcatacatgtaatgtatgtcgtttaagggaaggggtgatgctttcttcctcttctcttcaaaataggtttgtcttcaaactttttaccgcttccaacccttgagggttatgtgaatttggcaagcacccaatgccttcagcctgtttcatgaaaagtcaaagaggccatgattgtgttctcaggaagacggtatatgtaaaagagctgaaccagggctgaagagatggctcagtgattaagagcactgcctactctcccagagaacctgactcctaacactcacatggctgctaacagttgtctgtcaccacagatctcagagatccaatactctctcctggcatccttgggcacctatggtgcacacatgtgtgagcaaaacagcaatatacataagaatattttcttttaatttctgagacaaaattaagatagttaaaccaagcaggatgtgatagggcacacctgtaagtccaacacttgagaagtggaagcaggaggattgggagttcaagactagcctcagatacacagaaatcagacaccaacctgggttatatgaggctgtatctgtaatagtaataataataataataataataataataataataataataatagtagtagtagtagtagtagtagtagtagttgttgtactagtagtaataataaatagtaaatttttaaaagctgccctcttatagaaactttcaacctctgattttcacaatgcgtgttagctaacagcagtatgatagagaaagtctctaatcccagaactctaaaggctgagcctggcgaatctggaattccaggccatctttagccacataattagaccttgtctcaaaagaccatgggctggggataaagctctgtcagagcacttgcctagtgctcagggccctgggtttaatacttagcactgtaaaaagaaggaagaaagaaagggattgagcaaatacttctgtgttgtaaaaattctaatcccgatctgggctttctactctgccttagaccattcagctcctagataaaagacacacacaaccttcatatttacaataagccttaaacaacacatgagctgggcagatatctaccctctatgctattagaatttactttcctatcactaaccccgaatcattactatctttcatctgggctgctctgagctctagctggccagccctcagggccacacttttcacggctcacctaactcatggcagcttctcctctagtccctccttactctgaccccaagcccaggaatcctcaagccagtctacgtctcttctatccagctcttggctgtcagcatctttatttaccaatcagaaataacttgggagcaaggtcacatagcttcacttggctctatgtgcagactctctggggcaacacacttagcattataatacacagcaaaaaactgaacctcgacacttctgcaatttcttatcaccataatatgcctgtagattttttcttccaaatattcaaactaccatctttcagtggcagttttctcttaaatccacatctttcatggtactatctgttccaaattttgcttccagggctatctctctttgttcttatgcatctttcgtgcagagggctgggcccgcatcaggactttcctgtttcctgacagtgatgttgcctaccactgcccattccttgcttccttcttaaccatttggacttaagagttcattcagaaatgtgcaaacctccggagggtgaactgagaagaaccaagtctgctgaaagtctccgtaaagttctggggtagctttcagcttctttccctgccagctccactatgctgcagtcttttctcttttaaaggcaggctctaacttgaaacctgtggttctccatccaacaccaacttatttctgtacctaccaaggcaagaaaccagtataaccagaaaggggagtccactttgtttccaacacatgaccatggtggagcatctaactacaaaacatactcggtctgattttgcttcgtgggtgctgggaagtcactttataaatttatatgaagtaagtcattttgaaactaaagaaaaagatggtatatctgcgaatgaattatacaaatacattcactttagttcactttactttgagagtatagatttaaaattgttaggaaacatagctaaagtgcttgctggcatctcagtttacaagcacaagtcaaatgttgcaaaggatccacttactgaatgaagtagagtctagagtttaagatgagacttttcctaatccatatgatggggttaactcagtctgagatgagattcaagtaagaacactgtaaagaaataatgacaaatcaaattatatatatatatatatatatatatatatatatatatataacacacacacatacatatactttgtggggctggagagatggctctgttaagagcattggttgctcttccagaggtcccaggttcagttcccagcacccacatggcagctcacgtctgtctgcaactccagttccagggcttctgacaccccatagatttacatccaggtgaagcaccaatgaacataaagtaaaaataagttatacatttcttttaaaatgctttgaaacagatactaggaatgtcttttgcaagaagctccgactcttggatctactgatgcccagcagatgagaaagtaggagaaagctatcccttctgctttaaagctaggttcagatttgtgcccattcacccaggcgtgtcaaccactcaggaaacaccacatgatgagtggcctatatctgtgacctatatttgcctgtcttgtcccccttcaagggtaaaggcatggagacaggaggaggcgatgggcagagatgagagctggcagatctgctcctgctccagatgagcggagctagaccctggcccatgagcaactctcagcagtgcttgtcttactcagaagcaaacagaggcaagtcaagtgtgttgtttttatacttactgtgttttaaactcctttctgtttgcatttcctaatcttaattataggctattgtttttcccctcaaaacagaatcctatggggtataagtaaaaagactaggcccaactttctttgttttgtttttaatatacttaaattatacatttataacaataaagttataattatgacaaatatttattatatgataaatggtaataaatacatactggataaaaaatgtgcatgtgggccatcaagatggttcagtgtgcagaagcccaccctgacaaccagagtgtaattctgggacctccatgatgaaaggagagacctgactcctcaggttgtcctctgacccccatatgccacgacagacacacatccatacacatccccatgtatgcacgtgtgtatgcaggtgtgcacgcacacacacacacacacacatatatctagaaatttcaaagaatttcaaggagcatttgtttatatggagaaacctattaatatttaaaatagaaattttttaaaaaatgacatttaaaaataacaccattacatgttattacaaatattgtatttcatcaaaactattttacataataaaaacaattagtaggtggagcaatgttgctttgcattttgccaagtgttgtatgactcttcctagggagactggaaagagtctatgcaaacccaaataggagacaaacaacaggccaaaaaaaataaataagtaaataaagtcatcaaaacccagctggtgagccaaagacttgcttggtacctgctatcacagcttgagtgaggggtgacttccaggcagctgcatcaccatgacaacacactagagctacattccctgcatagcttcccaccttctgcagcatcagatctcctcccctggcatttatttacggctacaccttcaggaagcggcttcatgagccttataagttcctgccacttacctgtaagcttcttgtttttctgcatccccttccgcgaggggatgtttcagccctgaacaagcagctgcacagctgcaacccacactgtctggctccataaaatnnnnnnnnnnnnnnnnnnnnnnnnnnnnnnnnnnnnnnnnnnnnnnnnnnnnnnnnnnnnnnnnnnnnnnnnnnnnnnnnnnnnnnnnnnnnnnnnnnnnnnnnnnnnnnnnnnnnnnnnnnnnnnnnnnnnnnnnnnnnnnnnnnnnnnnnnnnnnnnnnnnnnnnnnnnnnnnnnnnnnnnnnnnnnnnnnnnnnnnnnnnnnnnnnnnnnnnnnnnnnnnnnnnnnnnnnnnnnnnnnnnnnnnnnnnnnnnnnnnnnnnnnnnnnnnnnnnnnnnnnnnnnnnnnnnnnnnnnnnnnnnnnnnnnnnnnnnnnnnnnnnnnnnnnnnnnnnnnnnnnnnnnnnnnnnnnnnnnnnnnnnnnnnnnnnnnnnnnnnnnnnnnnnnnnnnnnnnnnnnnnnnnnnnnnnnnnnnnnnnnnnnnnnnnnnnnnnnnnnnnnnnnnnnnnnnnnnnnnnnnnnnnnnnnnnnnnnnnnnnnnnnnnnnnnnnnnnnnnnnnnnnnnnnnnnnnnnnnnnnnnnnnnnnnnnnnnnnnnnnnnnnnnnnnnnnnnnnnnnnnnnnnnnnnnnnnnnnnnnnnnnnnnnnnnnnnnnnnnnnnnnnnnnnnnnnnnnnnnnnnnnnnnnnnnnnnnnnnnnnnnnnnnnnnnnnnnnnnnnnnnnnnnnnnnnnnnnnnnnnnnnnnnnnnnnnnnnnnnnnnnnnnnnnnnnnnnnnnnnnnnnnnnnnnnnnnnnnnnnnnnnnnnnnnnnnnnnnnnnnnnnnnnnnnnnnnnnnnnnnnnnnnnnnnnnnnnnnnnnnnnnnnnnnnnnnnnnnnnnnnnnnnnnnnnnnnnnnnnnnnnnnnnnnnnnnnnnnnnnnnnnnnnnnnnnnnnnnnnnnnnnnnnnnnnnnnnnnnnnnnnnnnnnnnnnnnnnnnnnnnnnnnnnnnnnnnnnnnnnnnnnnnnnnnnnnnnnnnnnnnnnnnnnnnnnnnnnnnnnnnnnnnnnnnnnnnnnnnnnnnnnnnnnnnnnnnnnnnnnnnnnnnnnnnnnaattctattaaaaattgaaaaaaatcctccccttaactaaggagctattggcaattaatggtcatactttttaaaggcttgacccctggaaggtcaactgcatgccagtgaaagatcacatgtccaagagtggtatatgagcagcacaaatatatatatgagatctgggaagaattaggggaggtgggtaaaaatgatcaaaatatattatacaaaattcttttaaaaaactaaaaaaaaaaaaaaaaaatcaaataaagcacacatagtgtagaacacatgcagtttactggacatgaaagcccagtctcagggggtgaggttggacacagcctgaggaatcatcgtgtgtgcaaaagtagctggggtcaaagtctctgtccatgcagccccgatggatgaacgaggctcaaactccccctctattcccaatatgtccgttcaagaaacaaaacaaaaagcagagaaaggaggtgtgttcagtgtggccacactgggaggaggagcagataagcagcctgagtctgccttggggtacgtgagggttagggttagatgggggggacaggtagaggaatgcatatgaaactggaagagacgtgatcctgttcatcagctgacaccagatccactgtcaaagctctgtaacattcctcggaaggaagagcctccgctaacagcagggcttcagacaacagcaagtcctgcaagctcccttcctgcagcaagccctgcctgagaaaatgctaatcctttggcattcattgctcaagaatctgatagtcagtgggaggagagcaagtatttcttctcttaaaaatatcttccctccagccaggatggctgcaactatactggcctacatttcatttcacttttaaacacacaatatttgtgctttctttgggaatttcatacttatgtgcggtgaactttgatcacgagctccctgcttccagcttgaactcttctttggctctgcccctcccctcttgtgctcccttgtaacttcttgcctctttctttctttcttttcttttttttaataacccactgaatctaattagtggtgtccataggcacatggctgtgagggccgccattggaacacagtcaagcacctaagacttctgtgagctataattcaggaaggcttttactacttacaaagcctctagccaggcagcttttcctgagggacttatcctatccaggtgattgatggggtcgcttggattgaccttctttcaaaaggccaactgtattttcattctctaagaaagtctcttacagatcatagtcttgagatttatttttattttatgtgtgtgtttgctgcacgtatgtttgtgtaccatgtgcatgcctgatacccacaga

SEQ ID NO: 875 - DNA, 1005 bp, Mus musculus
gcagtgtggctttgaaaccatgcctccttcaggccctgcaggagatgtctatcgtctggccttgaccatcagttccgttcctctcagatgaacagtagcccaccacgtcaagagctggccctgcgcttttacccacacctatgattgttctgccagtctcctgtgctaggttttacatctgtcagtccagggcttgactgttcatgggagaagggcaggtttatctgagtttgtggttccagaggggtaactatccatcatggcacagacacatgggagcaagcagcaggcacagcggctggagcagggtgctgaaagcttacgtcatggagcacaggcacagagcagagagaacaacgtttccctcagtaccgtgtcccacgcggatgagcccagccagcgtgatgaatcctctcgcctcacagtccggatggaaaacacctaccagttaggtcccaccaaacctttccccgtggccactgtcaatcatattttggaagatgtactaactacctacctacaagaagcacaatatgacccagagttctgcagacaaatgactaaaacaatttctgaggttattaagacccaggtcaaggaattagtgattccgagatataaactaattgtcatcgtttacatcggacagcgggatgaccagagcatagttattggcagcagatgcctctggaatcctaaaagtgatactgtctcgtcctatactttcaaaaattctacattctttgcacttgcaaatgtctatgcagtttacttcgagtgattgaaagtggtccttgtgtgttaaaatcatgaaccaggctgtgtgtctctattcacaaaagttctactggcaaaacctgtgggaaagagacaagatgaagatttcaaacaactggaagctttggtcgctctcgtgaggactggtggagggggacgggagcctaagaaacaggtcctgtttgttcaaagcagaagtcagtgccattcacataaatgtagatgctg

SEQ ID NO: 876 - protein, 172 aa, Mus musculus
LSIMAQTHGSKQQAQRLEQGAESLRHGAQAQSRENNVSLSTVSHADEPSQRDESSRLTVRMENTYQLGPTKPFPVATVNHIDVLTTYLQEAQYDPEFCRQMTKTISEVIKTQVKELVIPRYKLIVIVYIGQRDDQSIVIGSRCLWNPKSDTVSSYTFKNSTFFANVYAVYFE

SEQ ID NO: 877 - DNA, 46582 bp, Homo sapiens
tttttttttgagacggagtctcactctgtcgcccaggctggagtgcagtggcgctatcccggctcactgcaagctccgcctcttgggttcatgccattctcctgcctcagcctcctgagtagctgggactacaggcgcccaccaccacgcccggctaattttttgtatttttagtagagacggggtttcaccgtgttagccaggatggtctcgatctcctgacctcgtgatccgcccgcctcggcctcccaaagtgctgggattacaggcgtgagccaccgcgcccggcctatgagcaccctttctaacataagttggattctcacatccagaaataaatctcccaatctattctgggcaaaccccaaacctctgcaaattgttgatctatggaaatgtgaagaggcaactagctgatctgaaaaactgaaaattgatttggaaactttatgtatcttttattcgtattgtacctctgaagtatgcagtatctggctcctaggggtagggaaggaggaatagaaaagttacccatataataattacattattgaactaccagataacctgttgacatgctgttttgttttgcaggaaaatacttggcagataactaatgaaatcttatgcaaggatttggaggattcatataatggagaactgatgtatgagaaacagattttaattttggtttgatgaaaacaaaccaatatctgcacttgggatatatcaggtggaaagtcaatgactttcatctgtgatttccctcacacactaccatgatgaccagtcctacagtatttacttctaggtgtaatattgttaatggttttaaaatgtaattattgtatttgtaaattgtactctcattccagtaaggcagttagacacttgagttttagcattttaccattcctgaaatggatataatttaaactgtggtatgtaaatttaatagtagtattgttgaatggcacaatgcttacagaggtagattgcattttgtcaatatataaaatttaaatataatattgatagctgtcataaagggggtgccacatattaaagaaacttaagtggaaccagaagaaaaagaaacaaacttacttttcttcaatgcttagtatgttttactctagtgctaaataaaaactctatcttcaaatgtttagtgggttaaattgagaaactatttcagaaaaaaattctaaggttacagcatattcaaagaaaagcattagttaccactttttaaaaagcttttttttcaaactgcaaatttcataaaaatgcaaactgtgtaaacagggcctcttatttttataacttgtgtaaaaagggaaagcaattcatatttaaagtttaagtatattaaattataatcaagagtaaagaagatgctgaagtcttaactacttgcccctctctacagtttcgcaaatgtggggattgctgaataatcagtcagactaaaaccaaaattgtgattttaagatttcaagactttccgtagttgaactggttaagaatttttgcttagttactctgaatagatgatcttactcatccagtatgggggaatgatacctcacgtcttcctctttacccacaggaatcaaaacgctgagactgagaattttagggaaaaaaaagtccactgtttagatccagaaggagagttttaatcattgtttatatcatttgagaatgaaaaaataagcttcataaatgaaattctattcacattactgtgtaataaatttccttttggatgattaggattcattgtataaaactgtaaatctttgccattcttggagaagcaaaaggagagttatcaaaaatgtatgtcgtttcatcgttgcaaggtataataaaaactgtaattattcaatctggccctgccatatgaacatttagaaagacaaacttcttcgggagtctcagttgtaaaaccttccctcattaatatctgaaaatgttagtcttcctttaagtcatagaacttatttaaacataaaccaatttctattacaggttatgctattaaatagctgtaattattaagttattatttttataattagttgttaaatttcattttacacccactcaaatttaacaaagaatctttagcccctttaaattttagaattaaattaaatttttaaagttttacttctaaaatgagattgtgactggcaattgtttatagtgaaactttttaaattaatctttgtactcctctatcagtgcttgctaccaagagaatgtccaaaatgatttgttttaccatgggaaaattcttactattcaacaaactctcagttggccccctacagcagtctggtgttgaagtttctttgaacgaactaaatatactcattttatgtaaaggtatccaatttgattttgaaaccaaaatagaaaatgcaaaattctaaattccatgaaacatggaatttatgacaccaaaatcaatggagagtaagcagcagcaaactgagaattatccagcatatgaatataacaatgtgtttttaagtaatcaattcatttaaaaaattgaatattaatacaaagcatattaaaaacatgtaaatattactggttctcatgtctttgtatttatattttattttgttttattttgtatagatctagaatgaattagtaattaaacacaagggtttttttcccaaaaaataattttactgatttttaaaaatttaattaaaaacatagattacagtaatctctaacattattcaaatctttctagggattaaattagaaactatgaagaaatcctataatctcttaactggtctttatggaacagaatgggagtcaacaatttcaaaatgattgaactatgagtaaccagaacctcaatagaaaatgtatcccttcacctttcagaaaagagatcaaataataacacaataagctggtatcagggatttgcattttgacattttgttgtttctttttaattttgtagattataatctcctgttacatctatatccacagtactgtagaataagaattcatgtcctgaaaatggtcccaggcaatgaaagagtctcagttatcaaagacattaagtcagattcatttattcattttattcccaagtcagaacaaaatgaactagtaggtaataaaactattttcagtactaggggttaaaacaaaaagaaattgttctagttaaccagaacaccatttcctgaacgttatgatctttaaaaggttctgctttagcaagataaaaagtataaatgatgctactttattttggcaacatggaaattttgtttttcttttccaataaaatccatattttcgtgaaatttttaaaaataaatttgtatcaaggattagtctgaattttatcataatagaaatttataattactaagaattaaatttttaatcatttttaaagctgtgttcttctctacacccacagccaaaatggaaattcactgtatggtatttgggaatatatttcacctgtaaaagaaagaatgtccacaattcaaacggttttgagttaatagataggaatccctcagtcaaactacagaattttttttgttttatatattcttagtcagcagagtgtttgagctataattacaagtatttccacttctaaatcttcttttagaaaagcagataactataataccttggctctgccactgactcctgccgtatgatattggacaaatcactgcccttttcagtttctcatctttagaatggggagttgggattgccagtggttttcaagcttttcttaacagcagggctttttttctaataaaattgcacatggaatcctggtaggcaaaacagctcaaagcaatgcaggagtttctccaacagtttaaatcggggctccccagagcatggtttaaataccataacagtacacaatgatctatcatgtgtcttccaactctgaagttccacagttgtaatttactcagataaaccaccttttgaggctttataagcaaacttgtaaaaacacagtaattgaatgatatacaataaaaactgacagagtgtttaccatgtaccagtcactagagatattagctcatttaattctcttatcaatcaaaaaattgtaagtactctttttaattcctgttttacaagtgatgacactgaggcttaaatagaataatctccccaaaatgacacggcagctgaaagtaacccagctattctgactgcaaaggaaacgccttaattgctttgtccaccctgaacaaaacaatctgttttatgtcactatacgtactccatttgaatgccaaggtagaaggcaccatgaaaaaccattaccaaaataaggataattccaataacaaaactgtcaaaaaagaatcactgcttctcaaaatatgattggtatcatcacttattaatgttttgtatcatcacttattaatgattttggcttggtcaccactatgcctggaagatagtaggcactgataaacattgttaaacaccgtaacaacacaaaatgatctaccacatatcaatgtcttccatctctgaaattccatgattctactttactcagatataccaccttttgtggcattataaggaaacatgtataatcaagttcatacaagctatacacagtaggcatcgataaatttgtattgacagcataaacttctagggatgagatttgggaatatacattttgataagtgctccaaatttgagaatcattgctctagtagatctctaaggtccttcttagttctgacattatatcagattttaagcattaaattctaagatgaaaaccatttttctagtcagtttatttttcattcagtccacttaatttcctccaatcttaaaaaatttttttccctaggaaaatccctatctttttcttaaagttactctgttatactatctcagtctcaaagtagcctgaaatgcattttctcattttcatatttctgtccttttcttcaatgtcttaaaagacttgaagtagaagggaagttgcaagctgttatttattcaaatacaaaatcctaatcaatgtttccttctttgcaagggacattcagatctctaacttgtgagttgaacctatttattttgtaagcttttgactttacaaacatgtggtagcctcattctaaaagagttgcacgaatattttttctcaaaataaccacaggctgtaaattaaattgaacaatacagtaaaatatgcagatacatactaaacagatgagtgtgtgtgtatgtgtctgtgtttaagcttttccttttccaaaagattatacatttgagcaaaatcccattcagtctaaatgtactcattttgccacatggttttctgatcagcaatttttttaaaaaatggaagtgttacattatatttaataatatcaaaacaagagtgatctctaaatatagctttgaaagttaatataatatgatgtgtccatgcaatgagtcaaattagattgttgatataaatgaacaaatcaatccaagttacattgattaaagggactatttggatgaccagcctcaccatcttttactgtgtgcactttcctcttaaggttttattgtattttccctgctcctttaggcttttttttcatgtggaaaacagtatctaaatgccattctctcacttatgaattaaatatggctaccattaatgttcctttttgtcagtggagtgtatggaaggaaaatgagataggagtacattgcttaagtctctaaatattaaaaacaacaacaaaacacttgcctttctcttgtgtcattgcttcaatgttctgtcatcttctgcaagctagagttgcactgctgacatctaattaagatctaaatatatttcatgaaggaatgtcaaatgtaaagtctgttgagttgaccatggtgaacctcttgattggccctcacatttaatatctgatttctctcctaaatgggtatgtctatgaggaaaagacacctatttgttggcattgaccatgggtataataatttattctctaggtttaacttctaaaattatttttcctttgatttctaactgcctccttctatccctagagtaataccttgcctaccttaaatacatctttatccttgtaaaaaatgttttggcaaaaaacaaatatatttttaaatgtcccgtaatgttttaaagaaaagaagtaaagtgtatttgggctatgctcaccaatattccagtattttacaaattgtgttctggaagatgttcattgtggtctgagaacaaatggtcctatactataattctctctccttggacattgacaataaatgttagtgttttaatgaagcttaagaaagttattgaatcaggtaaaaaaaattttttctaagcacaccttgagaaacctttggaaaagttttcttttaacactagtttatatatccttcaataattgtaaataaaataaccaggaatgctttgaaaaaaatgcttctggaattttgttttaattttaagagaattcctgtcatttcaaatgaattgttatctattttaaatttcattagtatctcttagtgaatttaactttatcatctaaaatattcaaaacaaaacaataaaattattttaatttttgtattatttttaaggcttgcacctatgaccagcatatcagacccctatctgttgaagatgtttccaattctttgccgtgtggaattaatgccagtgaataatctccagtaacgttttactaaacagctttaggaaactgaatcatgatagatcaatgttgacagtatttttacatcagcttgtcagaaattatattaaaaacactttggggaaagctaagagcagtgcactgtttagcacagattttgtgagattctatactcttttaatgagcatttcatagggttttttttttgctgtttttttttctttttttgctttgctttactttgccaatcagttacttttataccaaattaacgaagtttctttaaaaacttcctggttaaattgtctgttatcatatagaaaagaatcaaactgaatcactttacatttctctaaagatagttcagtttttaatccatccagagtttgtgaatcagcctgatagatcataagccatttataatttttaaacgttccattgaatgagtatatcatacaaatgttaattccatctcgctcattcagttttacattacttttatgaattttttttctcgcaaagtaaatgcttgatgttattcattcaccatcactctaaggtattttaaatcatacaacaagtaactatcacaagaaccactgtcccaagatccaaagtcagatttttttcccttttcaagttgctagaatgataattcatatagctgtgttgatttttcaggtcagaatttagttcttgctttgttaaatggacatacatgaaagagattggctcctatctaattcatattctctctctctctctctctctctttctctgtgtgtgtgtgggggtgtgtgtgtgtgtgtgtgtgtgtgtgtgtgtctctttcctctctgtctaaggggaattggaaaattgctgctgaataatttttcttgaaaaagccaagtgttgatatgatgatatattaatcttatctatgaacagagcttcaccacaggccaagcagtaatgtatacagctggctttttaagctgtttgaacactattgttttcgattaaaaagagtttttgtttgtttttcacttgtatagtaaaagatcatatgaattaaatactcggatattaattttcattcttactaagtggccatgtaaggcattgattttttttaaacttgaacaatgcaagaatctaggaatctcagaaagattttgctgtgtttctataggtaatgaaatcctgtcaattaaggaaaatgctgtgtgtaatttgatttggtggtagcctttatttagagctctctttgatctatgtagcaaaaatacactaaatttctttttaatcttgtactaagtacataatttcacaaaaataccttgggcataaaatacttacaaaactgtgaattaaaatactcaagatactttcaaaatttagtcaaaatgttgattcccagcctttttcctacacgtctatttcaaaagagtatacttttttctgacagccattactgcttagtctgtaatgaaagctttactgcttctatgctgtgctcaagagaaaaccaacaacggaagcgaagacttacttgctccttcacagaattgcagcaaagctctctgctgggcaatggtgacaggaaagtgtgtaattgacttgttgaagataatcatgagaccatcttaacattacttgccttataagttagaaatagtatggatatcactctttgtaaataataatttttgtaaatgttttttgttcataattttcccaatcacctatttcacaaaatcctgaatatgcaattatttattatgacacgttactgcaactagggctcccattccagaacaaagtttaattctatatgtaagttgttactgaaatgtgatttctttttctggaaaataaatgaaaaatatgaaaataaattgaattgtgaatatcttttgctgtcagcctcttaaaattttacccgcatttctggaaaacttcattccatgtttagggtagggatggtgggccaaaggtctgtcaaaggtcaagggttaagagttagacaaatttcagctctgtgatttaaatatcgacttgagcatgttactcaacgattctacatttccttatcttaaaaaaaaatagagtaatgtcccctatgtcatagtcactgaacaaattcaatgagataatgtttattcatcacctagcagttcctatctagtccatagtagatattcaatcaacaatcctttcctgttcttatctttctgtgagtagagattgggatgggcaaaaatatctatttctcttcttccaacactatcctaacactgtgctccaccggaatcccaatgtattactgtcagctaatgctaattccagcaggacactcatcaagagccatgcccttggctagatgcttggaggcatcttgtttctgcttccaatgattgcccactacaggagggtccctatagtgtttattttgtttgcttttggtttggggaggcccaaaccaggcttaggctggggatagtcgctgaagaagaggaaaagcccattcataccagcaggtaggtcctcaaccccaaacagcctcatttcaaagcttcttagacattaacaggctcagaagagtcttgttaaggaaagcgaaggaacccagcccggtttgtaacacattggagttaagaccatgagtttcaggggccgtgggcatattatttaacattttagaatctcaattttccaaatcctttaaagggaaaacattcctttcttgacagagttattgggacgactaaatcccaatgtttgtcggtatctggggtatctggccaatgtaagtgctcatttacctccacattccaccgcctgtgccttggagggggaacgtgcgaagcagcgttaggagccgggaaaagggcagggctactttactttgtctttgcgcttcggatttcctgtgctaggaaaccgcagcacttcccactcctgcccctgatgtctgcgggaaaaggaacttgatgaggggccctaggggtgcaaatgtctttagtcccaaatgtcttcctcgctacacaatgaaccagttcccctccagctcgccgccaacccaggacgcagcccggctcagagtgacccccagtgggcagtgaagatgagatcctctacatccttagggcagctcagagggccactcagcggccaagtccggccggggagggccgagggctctgtttgaggtcaccctggagaccggcctcagagtccagggagagtgcgcgggcggccgccggctgaatgaagcctgggacgcgggagccgcgccgcgcgcagtgtctgcagtgccggaggtctgggaggctccgggcgaagcctccctgctgcaggtagggtcgcctctctctgcagcgcgtctggaccccaaaggaaggatagggggcaagggatcggccctttgttgagaaatggccctacttggccccgatctctccgccaccttattcctcctctccccaacacataagaaaaaatgatcccaaatttgggaactgaaagtcggtcccaacggttcgtcccctgccccattgcatggctgggggctgggcttcaagagtgatggccaacgcagagccggccagcaaggtcatcccctgacccggggcggtcttcctgtggctggccgcacccatgaggacctccaggtcccaactctggcctttcttggggagggggcggcctgcagggcagctttggaaacagctgaggccgagatgggtctatgtggctttgcagcaaaacctgaatgacccacctaatcaggctgtgtgtctttccacactcataaacacactcaccttcgtacacacgaacacagacacacttatacacacaggcacctgcacacacagagatgcacactcacaggtacacactcaaggacgctcacactcacgtgcacacacacaccacgctgcctgcctcacccacacacagcacctctgctctgacattgatgccactgggttttagggtatgttcttgtgtgccctacctactcaactgccagctccttgaaggcatggattctcttctatttttatgctttggtgtctagcacagtatttccttatcggggctctcacatttatagattatgaaataatttaaatgaatacttaaatttgtaggtagacaatgagggcattattagagttatagtccaagttctgggaagtccattgctactaccagctttttaacaagtattagtaggaaggagggagttttccaataaattatttatttaaaagttaagtcctatttgctctttacaaactatgtaaatgttgctcgagaaaacaaaacaaacaacaaaaaatctttgggaaagcaaggttaattttaatttttatttatttatttattttctagctccctacccctaattttattttttaaagtcatggtgggtcaggcacagtggttgatgcctgtaattccagcactttgggaggccaaggcaggaggatcacttaaggccaggagattaaggccagcctgggcaacacagaaagatcttgtctctacaaaaatgtttaaaaattagctaggcatggtggtgcaggcctgtagtcctagctactagggaggctgaggtgggtggaccgcttgagcccaggagtttgaagttacggtgagctatgatcatgccactgcactccagcctgggtaacaagagctagatcctgtctctaaaataataaaataggccaggtagagtggctcatgcctgtaatcccagcactttgggaggctgaagcaggattgcttgatcccaggagttcaagaccagcctgggcaacatagaccctatctctacaaaaaattaaaaattagcccagcttgatggcatacacctgcagtcccagctactcaggtggctgagttgggaggaacgcttgagcccaggtgtttggggcagtagtgagccatgatcatgccactgcactccaacctgggtgacagaacaagaccctgtctcaaaaataaaatataacagtgacagcaaatattaattagcaaagttgtattatggttacatttggggggcaatacaaatattggtttctgatgtaggatagcatctttctgctatacatgcatatcttttgtcaatgacctccgtcttcatcagctaagcatttttgctatagcttaatatctgcttatgtaaataattatactattgcataaataagcattttcagagttatcatagttccagtttcactgatcagaataacaacaaattctatatattgctcttgaggaaaccccactttcctgttcaaaaatggtaggaaaactatctgtgtactttgagattagtccctgttatactaactaaaatgtttccggatctttcttttgctattttacaaaagtcttcttccataggttatgatgatgtcagacaatgctaaaggcagagcagctcattcatggaagaaaagagggagtatttcttctctaagtaatcatgaattttggcgaaaggaaattcatgggcgcatcaaagagtgagtaactgtctaaaattgtaaattcatttattgaataaataggttcgtaatgtttattaggagaaaaaaacacttcctcggggacataaaaagagataaaatgggcaagtacaaggtgcaggtcatctttaggggccatatttaaaaagaaagagaaagagagaaagcttaagtgataagttaatcctagcagcatttttgctatttcaaaaatcatcccaaaaaaccctctgctcaaaagaaacaccacatgcaatgtaaaccagacacgcttatatgtcttttgagttcttctcctcaatattttataacataggttttgcatttttgtaatcaatacatacatatacaatgtacttaacattattgtatataattttgtcatgtattttcatagttttttccatatcctcttaaatgactgcataatattttgtcaatttatgattctgggttccttaaccattctctaattattggacactttaagtttgtttccattttttttcttttttactatatgtctgtgcttggtcatttcccagaagaataattagtaggtcaaagggcaataagtagattttttggttcttgctacatgttgcatcttctctcctaaagatatacatcaatttttaatattttcatggcatttccttttgactgctgttgggaagaaaacaaaacaaattatcgacgtagcagtcaattaataatagactttcgttcttagtttctatagctttggaggatgttgtatattgagtatatattgggaagcaggagctagggtgtcctgcagaacagagagtagaagaactggaataattagaattctgaaaccaaaatctttctattctcagagtgtattaatgcctacttgcaactccacattccagccctggaagtctgtggattacacatacaatgccttttacaggtgggaaactgactataaaggagtagcaatcccagcacatgtcagaagtaaaggtgggagaatgattaatctttgtaatttttgcttctaaacttttctggctgctatttccaatagttaagtgcaagggttattttttaaattatttaaaactgattgttggcttaaattcaacttacgttttccaagaaactatttaagtaatagtctgacataaattacgtacccatgatatttttttaaatactgtctccaaagattaaattgtaattcctatttgcatgacttttacttatcttttccccttcaaaacaaatttgtcatatagaatcagagtgtggctacatttgaagaattagagatcactctttttaacctattattgatgaatataaatacatattaaaaataagaatacaaaaatcatatttatcaacacattaggatagatttttcactgacaactacatttaaatgataactattttggttttggactcccaaacaaaacatttagaatggaacctctatttgtactttttttcttaaatagcaaatgatcagcttccaagtccccttgcaatgcagactatttaggaggctcccccaccccatgctaacttgtattaatacttgctttccattggcttcctcactgtctggaattagacagtacaagttattctccttcatgaatgaggcttcaactagtagaaaaattctgaaagcttagtgactatcaaatacaggcattgttttgaaattgcagtgttttatggaaaaacatataactttcatttgaaaattactttaaaacaattttgaaaatataaatttcaataatgtaaaacattctgaagtttattaaggactgaatacattatctcactgaatctccccagcattaatcctactaggtaggcatcatttctaccactttactatgaaataactaaagtttacaggtcaagtaatttgacttaatgattaggatacagtcccaaatcctgactatgagatacaaagtccacagacccctatctacttccatagcaccatcttccccaccatcttgcgggcatcatcccctccagctatactcaattattcctcagtgctctatctggcccccagccattgccccatgttgcttccccatggggtaccccgactccttgcctgcaatgctcttcttacactattcccctggctttcttcacttcttccatcagaatttcgctccatctccacctttttgggaagtgctctctaattactcatctatgaccacctttacctccagactgcattggatgatctgcctttcttctcctactgcttttgccttcgatatgcactatatttggtgatttgcttgtctatctctttcaacagactatggacttatttgtctttttagcggtaaccacacttataaggaggacatgaagagtaaaggtagacctccttgaaaagctgcttcttatatgtggtataagatcagcacagatttagccctacagtcttggtttccatgtctacagtcttccacagttgtaactaatgcttaacaatgatccccagacagaataaatatctgaaatgccttctgaattacaaaaagaagattaaatttatattaaatattattgtgaactgttttcaagattgggtctgtttttaagttatcttttcaatttaatgtaatttttatgttttattaaagaaaaaacagaaacatcttaagctggatcttattatcctaactgttagtgtgttggcatatttctgttagacctggacatacatatatcagacccatgctgtctgagtccagacagtacactacacagtggtcatcatactccatctgtaatttcaaattattttttacctgaacaatttataataataaggatgataatagctaacatttatagggcccttgcgatgaaccttatttatgtatcatagaagctccataataggagttggcaaactatgacccaagggcctattccaatctgcatctgttttgctaaatacgatttttacataggtgaaaaaaatcaaaaggggaacagttttttttgcagcatgtaaaaataacaagaaattcaaatctctatatgcataaagtttattaggacacagccattcctattcacttgtgcgttgtctctggccactttcgcactgtaacagcagagttgagtagttacaatagaaaccgtagggcctgcaaatccaaaaatatgtgctatttggccttttacagaaatgtttgccaactcctgctctataaagatagatgttattatctcccccattcgacaaatgaagaagcagaagcttagagagattgaggctccaaagctacagaattaacaagcagcaaaaatgggcttttgtttattagttgagtattttcatttcctgaaaattggcaatccatgtgtgatttgcattaataaaactattctgttcattcaccagaaccttctgtttcccgtccacagtaagagcaggtctttacaattacatctttcttattggaagctcagactttggcagacactgaacagtgtttgaacagatgtgcttctctcatttccttaaaatggaaacagaagctatgaggtcaagttactttcacaggatcatgtgacatgatgtctaggcttgttatctgtgaggccaggagttccactagtagattagggacaaggttgggggctgaacattctctcctttgcctcaaaccaaaattacagtgatgtcatgttaccagaactttctgtatggatcccacagctccccgtgtgaacccactgatggcatctaacataccagttaggccacactatatgtatttcttcatttattcaggatttattagcttctatgtgccaattactgtgccacatattaggcatataaaggtgaataactacaggtttctaatttagataagttcatttttcagggaaactgagagctgcctggtaacttttttcacattgtctaggtcttgccagtaaaagtgaccaaaatggaaatgattgcattcattacttcatttcaacagtaatgaatttattctatcattcaatctatactactgtgagctgtttacgggcaattgaaaatggtgctgccagaacaatttcttcattttgatacctgaaggagaaggctagagattagaagatcagagttaggagataagttgtatcaccatgtatgttaaactaaagcccccaacaagacctacctgagatatagcctcccccaaaaagagaaaatagtttgggaaaactgaaatggccatgtttccaaatgaaaccacaataacaactaatattgtattgtcattttaggttattaagccatttcacatacaatatctgtgtaagttaaacagacaagatatttttatccccatttatgtttgtaaatggggaaatgatagattgtgttggcagaaaactggctcattatagggaggaaaatgaagctggcctcctaccttatatgctttgcataggtaaactccagatggaagaccaaaatgtgggaatctattaacaaagctaagagaagaaagcacaggcccatatctttatgttctaggagtaaggaaagatttctgaaagaagatcccaaaatgaaaactcacaccatagagcaaaataatttttggataaatataaccacaataaaatctagggcttctgctcaacaaaggatacaatagacataattaataggctggctgaagatacatacacgtttttttaaaccctgtacattaacaacttatgctaggaaaacaatttttaaaatagtcaaagaagacagcaattttcagaaacaaagcccaaatagctaagcagaatatgaagaggtgctaaaactcactttcaagcagaaaaaatataaattaaaacaagataccattttgcacccatccaaatggcaaaacagaagaaaagagaataataccaaatgttggcaaggcatgtgagagtaaaacctgatatcgccatttggcaaagaaagttaatggtttttagaaaatacaggggtgtgtctgctttatcagagtaagagcttacagaataatggctcacaaagccctacatgatctagctacctgatacctttgcaactttatcttctttcactccttttcttcttcctccctctgctacttgtctctatgcattttctcaaacacactagcagcctcctgtctcaaagcatttgcatgtgctgttctctcttcctagtatacctttccctcagccatccatgtggttcatttcctcacctcctttctttgttcatgaaggcctaccttgaccacttcatttgaaattgcacatcacatcttctcctccacccacttccaaactcccttaacctgctctattttttctcttccctgaggcatgtatcaccttttatcataatatataatttgcttgtttagtattttattgtctattctctgtcttgccttactaaagtaacagttccatgagagcagagaccatagtttgtttttgtttttgttttttttccagtattgcatcccaaagacctaaaatagtgcctggcatataatagtcactcagtacatattttgtgatcatcgaatgaataattgttgcattttatcaattcctgagcaagcaagtttcttttgctcacgaacaagttaggttcacaggtccatgcatgtgttaagtccaggttgactaggggctttcctcttatagacataagatgcatttacagcaaatagaaaaatgcttgttcagattttcttaatgtatacctttacctccatgctgacacattccattgtgcatctatttttaaaaaacccaaaagaacagtttcatttgtgttggaaatctgttgtaataggccacactcctccttgatgatctccacagctttgtagaggtattcatggcacctgcactaccagcatcacctctgatgattgcccagcgtgacacagctttgaaccaatgcatttcatccaagagctgcaacaaaagttcatcagctgtgcttaactatcacctcccttgctcttggatgagcattagctcaacaggcttcagacactaactctgatcttctatccacatacttaaaattgttgtactttgtcaatcaccatttctggattaccttcaattactccagagctgcgcttttcacaggttgcatggttcattctttatccttcagcatcacttctactcgaaaaaaatatgttccacaagacagtgtcatttgtcatgttcctgcctctttcatttttgaaaattatcttttctttccattatagcctttctcttactagtaaaatggagcaaataatgtgagtaaaatacctaaaaactacaggcatactttggcaatattgcaggtttatttccagaccattgcaataaagtgtattttgcaataaaggaagtcacatgaatgttttagttttccagtgcacataaaaattgtttacactgttctgtatgtagtctattaagtattcaatagcattttatctaaagaaaaaatgtacataccttagtataaaaatcctttattgctaaaaatgctaatgatcatctgaaccttcagcaagttgtcatctttttgctagtggagggccttgcctcagtgttgacatctgctgactaatcagggatatggttgctgaaggttgggatagctgtggcaatatcataaaataagacaacaggctgggcaaagtgactcacgcctataattccaacactttggggagccaaggcaagaggatcacggcagccaggggttcaagaccagcctggacaacatagtgagacacccccttccctacaaacaaatcagccaggcatagtagtacctgcctgtagtcctaggtacttgggagactgaggcaggaggatccctaagcctgggaggctgaggttgcagtgagctttgatcataccactatactccagcctgggcaacagagagagacactatctcaaataaaataaaaataaaatgaaatgaaataataaaataaattttaaagcttgccacatcaatggactcttcctttcatgaaagatttccctgtagcatgtgatactgtttgatagcattttaccatggtagaacttctttcaaaattagtccattcatctcaaaccgtgccactcctttatcaactaagtgtatgtaatattctaaattatttgttgtcatttcaacagtgttcacagcatcttcaccagaagtagattccatctcaagaaaccactttctttgctcatttgtaagaagcaactcctcatctgtttaagtttaccatgagattgcagcaattcagccacatattcaagttccatttcttttttaaccattttaaattttatgttttttattgaaaatttcaattatgcatattcatggggtacatagtgatttttccataaatataatgtatagtaatcagatcacggtgattagcatatccattatctcaaacatttagtatttcttcctgttgggaacattcaatgtcctctttctagctctttgaatctatgtattattttcatctatggtcaccctacagtggtaaaaacactagaacttatttctcctatctagctataattttgtatcctttaacagtaaatcaagttctctttctatttccactgcatctgcagttacttcctccactgaagacttgaacccgtcaaagtcatccctgagggctagaatcaacttcttcaaaactcctgttaatgttgacactttgacctcctcccatgaatcataaatgttctcaatggcttctagaatggtgaatccttttcaacttactttgcccagatccatcagaggaatccacatctatgacagcaatagccttacaaaatgaatttcttaaatcgtaagatttatggggtgaaaagaagttggtgaatacatacaaaaatacaattagataaaataagttctagtattcaataatacagtagggaaattatagttagcaataatttattatatatttcgaaatagctagtgggggttaggggaaaaaaatagctagaggaattttaatgtccccaacacaaagaaaagataaatgtttgaggcaatggatatcccagttgtcctgatttgatcattacacattttgtatgcatgtatcaaaatatcacatgttccccataaaaatgtatcactatgatacatcaattaaaaatacaaaaataagtaaataaatgagatgaaggtcgaaattactccttgatccatgggctgcagaatgaatgttgtgttagcaggcatgaaagcaacattaatcttcttgtacatctccatcagagctcttgggtgaccaggtgcattgtcaatgagcagtaatattttaaaaggaatctctttttcagagcagtaggtctcaacagtgggcttaaaatattcaagaaactatgccgtaaaacagatgtgctgtcatctagtcttttttgtttcacttatagaacacagtagatttagcataattctcaagggccctgggattttcaggatggtaaatgagtattggcttgaacttaaaggcacaagctgcattagctgctaccaagaaagtcagtctgtcctttgaagctttgaagccaggcattgacctctctctagctataaaagccctaggtggcatcttctgaaataagactgtttcatctacatggaaaatctgttgcttattgtagccccttcatcaatgatcttagcttatccgatgatcttagatcttctgggtaacttgctgcagcttctacatcagcacttgctgcttcaccttgcacttttatgttacagagatggcttctttcctcaagcctcatgaacaaacctctgctagtttcaaacttcttccatagcttcctcacttttcttagccttcatggaagtgaagggagttagggccttgctctggattgggctttggcttaagagaatttgtgactggtctgatcttctatccagaccactaaaactttctccaaatcagcaataaggttgttttgctttcttatcattcatgtgttcacggaagtgacacttttaatttccttcaagaacttttcaggcaggtgcagtggctcacacctgtaatcctagcactttggaggctgaggtgggtggatcacttgagttcaagagttcgagaccagcctgggcaacatggcaaaaccctgtctgtacaaaaaattaaaacaaaattagccaggtgtggtggtgtgcacctgtagtccttgctacttgggagactgaggtgggaggatcacctgagcctgggagtttgaagatgcagtgagccaagatcataccactgcactccaacctgggtgacaaagcgagattctgtctcaaaaaaaaacaaaaacaaacaaacaaaaaatctacttagttatagtcacaacttgactaattgttggcccaaaaggcctagctttcagcctatctcggcttttgacatgccttcctcaccacacttggttatttctagcttttgatttaaaagtgagagatgtgggactcttcctttcacttgaacacttagagaccactgtaggattattaattggcctaatttcaatattgttgtgtcacaggaaataggaagacccaaagagagagacatgggaaatggctggtcagtggagaagtcagaacacacataacatttatcaattaagtcagcttctttatatggatacagtttgtggcaccctaaaccaattacaataataacataaaataacactgatcatcgctctccataacagatgtaatatgaaaatctaaaatattgtgagcattaacaaaatgtgacgtagagacatgaagtaagcacatgctgttggaaaaataatgctgacagatgtgctcaatgcaaggttgccacaaaccttcaatttgtaaacacacattgtgtgcaaagcagaataaagtgagtcacaataaatgagatatgcctgtacataaaaatccagcaaatttggaataaactaaataactgcaaaactaacttaccttaccagacaaataacatcatctactgctggggacaagttggtatgctttgctcttgagcataacactcataaaaatatccatggatagtcttaggtggaaagttcccaagtaaaggagtttctatgcatatttaatctcattctacatcctgttttttgagcagaagggctcttatttttatctgtgttaccagtacttcccactgtgcctgacatgttgtgggcaataaacatttgttgaaagaatgaagaaaaatggaaagtacaaatgtacaaatttataccctgaagaccttgtttttctctgtgcactctgaaatatcaccactgggaggcagcacatgatttaataacagcttatctcccctccgaagaagacacacttaaatgatactatatttataaacatggtggttccaggcatttcatagttacaaatagaaggaaaagatgatattctgacctttaaagatactactttaatgtctctaaggccagttatgcgttcaatattatctcttcctgcagcttcaaaacatctaggtataataataactctgaaaacgtatggaaatgagttctcaataataattagatgctattgtggctgatgagaattaactgaaattattgttaccatctctaactgtcataataaaaagacatgccttgtgtttatctaggtaattcaaagactggtcagcaagcaaatttgcaagatgtttttaagaaaaaaatgaatttcattaaagagtaaatatgttctaactttttcttttctttttctttttttttttttttgatggagtcttgctctgttgcccaggctggagtgcagtggcgtgatctcggctaactgcaacctccgcctcccaggttcaagcaattctccggcctcagcctctcaagcagctgggactacaggctctaacttcttaaataatttttttgtctttttcctgcaaataatcagaatgcatactattggattagcatggtgcatttccagtgtcagccaggtacaaataaggaggattacttttgttattctggaccaatttcatgcagctacttctgtatgcaggctgtctgtcctcagcaatagcacatgtggtttcagatattcactgtatttttcattgaattacaagttgttactcttccatctgcaataatattagttagtttgttaagtgttctcaccagtggtttacgccagactttcttttattacattacttttcatctacctttctttctaaaactttataactctctgggacacgttttgccaattgaatttttttctccataaatgccagcaagctggtaaaacacatagacagcaagaatattttttatatttaaaaaataaaaccgtagcattcactttacaatgagatcacgtgtctagaagggttgtcattgtaaactagggaaagtctgatgacagacaactgaaacccatccatgtgtaatattgtgatatataccccaaaaatgtattgtgccaggtatatggcactggtaattaaaattataaatttactttttgggtatctcacatatttatctttaaagatttcaaaggatttgagtgaagctgtttatcaatagaaaatatgcccaggtttttctaaaccagtattctgaactgatattggcaattccccaattttaaaacataaaactgttttatttctaaaaatttgccaagctcatattctggtttaatgctatttgcccatacctgcaagcattttaaatattttctcttttccttttttcttttctcaaggaataaatatcttattttttctattcaacattttccttcttttttgttctctccctttttctaacccatttcattctaatgtgggaactatcagatctcagatttttataatacaggttttaaaaagtaaacatttcctatacttttttatgatgttatagtcttaattgatgcacagtcagccttccaaggcacagaaagcaatagactaattattttacctctgcatgataagaatttccaggcttcacatgtcctcacttatcagtgggagctaaatgatgagaattcatgaacacaaagaggggaacgacagatactggggcctacgtgagggttgagggtggaaggagggagaggagcagaaaagataactattgggtactaggcttaatacctgagtgattaaataatctgtacaacaaactcccgtgacacaagttcacctatataacaaaccttcacatgtaccccctaacttaaaataatagtttaaaaaaaaaaaattaccaggtttccagcaaaatatagaaaatttactcctcaaagccccagttcctctctaaaactaattccaagttttatgggtttttactggtttttgttttgttttgttttttgagacagagtcttgctctgttgcccaggctagagtgcaatggcatgatctcagctcactgcaacctctaccttcctttcgagctgtgcttgtgcctcagcctcccaagtagctgggatctcaggtatgtgccaccatgcccagctaattttttaaaatatattttagtagagatggggttttgccatgttacctaggctggtcttgaactcctggcctcaagtggtctgcccacttcggcctcccaaagtgctgggattacaggcgtgagccaccactgccagccccaagttttatgatttattgattacttgtagcatcccacttccaggtagcaaactctgcattagttagactttctatcagatctactgctgcatataataataaacattagtttaaacaaaatagaaatttatttttctcttacataaaataagtctgaagagaggaagttcagaggcttctttcttatctgtaatctgcaaggtcacctcaagacccaagatagtgctgagctctggaatatccacattccagtcacaaagaagggtcaaaacaggctcctataggctgcattagttcttttgaggaacctctcagaatttccacacaacagttccacttacatctcattcactcataagccacataggccacaatagcacaaaaagagactgagaatttgtctttagtctgcacaggaatattcctacaaatgtaggattctgttaccaaggaagaaggaaagaacaactttagaaagtaaataagagtccctgacacgatgttcattataattttctttataatagtagaatattggaaatagcctaaaaggcatggatgatacatggttaaatgaaatccagaatgtgtatgtattaagtactgtcttgatatttaaagtattgtttgctatttattgacatggaaagttatccatgatacattttaaatttttttaaagcatctataatatgagcccatatgtaaaatcaaatgtctgaaatgatttttgttaatgttaacaggggttagagaacaactgaggttaataattttttgtaattttactttcttctctatgtttttctgtatgttttgaatttgtaaaatgagcatacactgtttatatgattcctatggaaataaaagggcactgaacaaatttatctacaataactcaaaaaaagtcaatctgcaaaactttctatttgcacaccaatcttcaaccagtgggatttttaagctgcccttatgacatttaccagtttcataatgataataatattaagtgcactgattgtcaatcttcagtaactgatagtgaagacagtttataaaaatccttatttgcttttttgtcttggaattttcactccagctaatttgagttttgtaccacctcttcttctccatgaatttttaatatggtgttcagtagaaaagaaattgagtttttatgaataccttctgtattatgcaagtaagttttaattgcagtgattaattatttcattgtccctattttcattctgtctgttataatcatacttgggactttgtcactaagaggtaaacaggacatttgaaatctgtctgccttttatacatgtacattaagccctttgcctcattccctttatctctgaaatgggtagaataatgaatcttttacttacctcaaaggatattgtgaaagtaaaatgagataatttatgggaaatgttttacaaagttaaaagtagcatatatagtaatggagcagactgacttatcttagaatcaaggggtttatgtaacattgggttttttaagcagcagtaatcatctttggtattgcccacaacacctgcagccagtgtggccaaacaggctggttgctacttcaaagggcagcagtaaattgaggaaggcaggtgttataagaataaagattaagtcactcatccagaaatccaccatgaaaaaagcagccagaatttcttccatcattttcttgggctgagtgggtaaaccctaatttatcatgtaagttgtattgcattaaaggatttttaaaaatagattacccgtgattttcttaaaatatcgatttgcaagaagttcattaattccaaacagcgtagaactaagtattttaaattccttgcaagaaaaaagatccccaaagattaagagcaaatatctattttttatttaattaaagcaaaaacatagcctgcttagaaaagtggtcactctgaacacacacacacacaaacacacacccacacacacacacatgctattatatcctcccctttgaaatgacatctgtcttaaagttcattttcacaggtggagaaaattgagggtgcagcattctgagactgtcattagttacagctgaatttcctctgaactaagttgaattaagtagtgctggagagacagtggggcctcctctttgcttgggtctcctgtttagcaccaggataagctcatattgccttgataacgaaaccaaaaccctttttcgatgttgaaaaggccgattgatgcttattaatgtattatagttttggtgaattgcggtttcctctaccacgtagatgagtttctcatttttctttttcatactaaagggattttgtgaactacatataatagtgaactctttataatactccatgtgtatatagagttgtcttccaacattttaagcttcctcatatgtcccccagccctgtttgtgagctttatctactttgaggagaggctttatatcagtggtggagatgcgattggcaatggattttgaagtatgtactgttaccccatacacatacatcaacccaggatcgctttctggataatttgatgacctgggtaactgccctgggcttcagccatcacattgagacctgctccaaataattcctctgcatcttaatatttccatctctaaaatgttttggactttcaatatgccactaggatatttacataagacttacttgaaattttctgagaaaacttcatctttgtaacattttagcttaaagcaatattgtattttgttattattgttataataatgactaaaatttgttttctcccttgtttttagttctatgagtactgtgtcttatatggaagaacccagtcagcgtgatgatatctctcgccttacagttcagatggaaaacacctatcagttgggtgtgttcttttatctctcactcctattttaaacttctaaattggtgactgattctcttaaaaatgatatttgataacctggcattgtcttcaattctagcacaatataagggactttaatgaattgagtgatttgatgttgctttagtttcttcctcagcaaaaaggtaacaacacttgctgtcttacttttctttactaatgtttcccaaatgccaaacaattcactgggtggcactgatgcatacagtatactactgacttaacaaattcactgagtatttctgggtacatagatatgacttaaatgaaagagataagtattgatattttatccaacaaaaccaatcagtgttgttaggtgaaggaaaaaaaaaaactcaaagcaaaggcaaatgactcatagtcccctgttgacagagacgtttatccattaccactgaggttttgagtctttgaaaacaaagatctttgcacctgccgctatactcccaggtggagtccgtggcaaatatcttttcccatccatgtttcctcatagacccacttgttttctctaaaagcgtacctgcccactattacctgaattcatacataattactgctatatggaaattccacagagatttaccaaggggcaaagaaagactctatgggccaaggtgattccatctgtggccagttaaccccaagaaaattatagaccatcagcctgtcccctctggccttgtagccagttttctacaggagtccccaagactacatggattacacggctccataattagccaatctactggtattttcacagtgcctgtggtggacagctaatattcctgccatccaatatacttttatacttctctggtaacctcactaaatttcctttgaaattccaccaacatcaccacttttgatcctagcattctaatgaagctggcactggctttatagatagagcagtgactgattctaggatggcatataaccatggtgaatccaatcaaagactttgagattaaattcagaaaatgttgtttggcctgttgcagaagaacataaagccctgaaacttgaaggaatgtaggggctctggcaggatctgccaccttgccctgacttgaaactgagagaaaacaacagaatcctggtgtcatcatttgagtcctaaatccaattggctaccctttaacttttcagttaggcaagctaagtttgggtcaggttttccctcacttgcaactaaaagttcttagccatggggtgtctatgactttgaactgtgcatgctggaagggtttgaatcagatttgaacaagacagggccagtgaaatgtgaatctctgtgtttctacataaggatattttttgcaacttgttttctcaaataaagcatcttatcagttttagaagtactgagtatgaaccacattagaaaagtaattttagaaaaagcttagtatagatgaaatatacctgtattttcctacaatagtctatgtgaattttttaataattaaaatattttatgcttgacaattccctttttatagcattcaaccagccattttattaatacttaatcaaaactgtgtttccacttctacttgtttctgggtttatttcacatatgaaaggtattttgtgagtgtattagtccgtttttgcattgctataaagaaatacctgagactgtaatttataaagaaaacaggtttatttggctcatggttctagagactatacaggaaacgtggtgccaacatctgcttctggtaagacctcagtaagcttttaggcatggcagaagggaaggagagttggcatgtcacatggcaagagagggaacaagagaggtgccaggctgttttaaacacccagctctcatgtgaactaatagaggaagaactatagagcaagaactcagtaattaccgctgggacagcaccaagccattcatgagggatccaccttcctggccccaacacctcccaccaggccccacctccaacactggggatcacatttcaatatgagatttgaaggggacaaatatccaaactatatcagtgggactttggtaaatagtttatcatatctttacaatgtaatactggccagaaaagtagagggaaatatcagccaatcaccagcactattatgtttaattaatttttcattccattcaataatgtttgcctcatctaaacacatcttaaatgagagcatttacataaataattacagctacaaaaaatgagatgaaacatgagtatcattcatgagaggagaaaagggaatagaaaaggaaagtgtgtttcttttaataaaataccatttatatatttctcattaattactaaaacaaatataaaagaaaatgcaggctgtggcatctgtcgtatctgaatttgaatactaattttgctaattccttgagcaaggtatttagcatcattgaatctcagtgtcttcacttgtaaatagggataatagtctatacatcacatggatgctatgagactcaaatgatgttatatgtttaaatctctccattcatcatgttactactcctgaaagtgactgactcaaggaccttactatagatcactaagaataaaagccttccatgatattcattgtaacttcatattaattatggaataagttttccacaggactttttctggaactgagtatagtggcacctggttgtttgcaaacatggactgcgagcaccgagccaaactagattggcggccatctttgctaccacatcaagacagcctgccttgagaatgaagccagcacagtagaaagtagatccaaaatattgagagagaaagagagagattatttgagttcagcttccatgaagtgctcaggccctgtctctatgtcaggttttcttagagcctgtcaatctctcagcattgattttacaccaccacatggggtccttcctaatcccacaggcctcactgtctccagacttacgtcctctttcatcttgctgccttctcagcaaggtaaatccccaattcttccttcagcatgcaataactacaataacagcaataacactaataagatcacatatctaaggagtgttttattgtgtgacaagcactgttctaaacatattcaatttattgtctcatttaattctaacaaaaaaaaatgtagtaattattattattaccccaatgtggggtagtggaggcccacatacattaagtaaacttatctttatctactttttaaggacaagttttgtttgtttttaaaattttttttgtcttgatccttcaggtctttgccttttgatttctaaaacacgttttttctcctaaggaaaaaaaaaatctcgagaaagaagaaaagctttgccattcacatcagtttactctgaaactagttttaggagcttatttcagaagtcagaaactgaacattgatggatgattctggatgtttaggggaaaggtaacaaagaagtaagaaaagaatacttcattaccatatttcaaagtattttcaaaacaggatctggttaatgactttttttttaatctaagcgaagtatggaaaggacattggtagcactgtacaacgggaactactggaaacagactcaagtgccaccaggaccctctttccagcactaacctatgtgcactttcttctcttttggtggcctggcctccttaccaccatgaaaaacatgtcctccagcaggtcctcagagtcacatggtaacttttgccaccagaaagaggctgactcttttttcctacttgcagtttaaaataaaaattccaaaaaaagactctcattgtcctggcctagagcattgtcaccctgggttaatcaaccatgccctaggcttgggttcgcaggagatgatggggagatctttaagaaccactttacctatctagattcaatctccacccccacccttccacgatttaagtggaattcaacaatttctatattatcatcaaaataaaaataacgatttatagaacctcaagaggctcacctaactgaactgcagtcagaggctgtaaccttctggttaagttcagccagtgggaaacctcagctgagaggcagagggagtgagaagtgtgaggtggagctgtttatttccctggctcctgcctgtgagttcatcacagcctggttacattcttcaaccaaaggacagaaactgctcccaagggagccctctccacatgacccttctgggatctattaaaagctcttcctctattccccaatcttggggtgggaggggtgggctgacaaccttactttcactggctgaggggtgctgcactatcccttgtgattttctacagcccactcagaacttcctcctggaattattttaactatagggtgccatatgtttcatttgaccctgacagatacagtcatcacaaacaaacacttattactagatattgacatatattaaaagagaattgaatagaattcttgatctcattccttcatctttatcaattcaacaaataatgactgggcttctgtatgccaggccctgggcacatgttcatgtcatgcaatgacattagtatatgaccaaagtgatgatatggctaatattcctgggatgcaggaggaagaagattcatttgaagcttctcctctgaacgtggatgaaatgtggtcgagaatataagctctagcatcagataaacctgggtgtgcaccccagctctgcctctctgtgtgattctgggcaggttactcaatgtatataaatctctgtttccccacctgccaaatggagataacagtgagattcacctcagagatctattggaagactatataaggtaatatgaagtgcttatcgcactgcctgacatgtagcaacggcttaataaaaagtattcattattatatatgtatacaatatacagtcatatatcatatataatgattatctataaaatttaattctatttaaattcagaaatcatacattaaaaatttcttatgcctttagcattgtattagactctgaggaggataaaatccgagcttgcttaccatttcactggaaacgcaggtatgctttagccaatatcaagtggattaggagccaggatggcagtggggacccagtgcatggaaaggagggacatttttacctgagaggaggtagagtgctacctggagaagaagacatttgagatggtcttgaaacatgagtggctgtttctcagatgaacaagatggggaaagatattccatttgaaaactaaagagcaagagtaaggacacaggagcacctttatagacagatggagcctgtgaggctggagcagtccacaagaggggcactgtggtagcgggagaaggggcagtagggaatcacactttagacctcgctaaggggaatgtcatttaagatctggtagatagattggagcgggagatataagaggtagagagccagttataaagttgttgagactttgaagtatgtccacaacaatggggcctgggaaggaagagactttcaaggtcaaaccccagcagtattgaacacacttttgagatagtcacgtaaatgtacgaaaatattgtcttcttgttctctctcagagcacttgacaggaaacctaattagagccacttgtttctttcaatagagtccacccagaagattaaatccctccatgtttccatactcttttgattagcctatggggtgggtgggtgtgatttgaaattactttttagaaataaattttatgtgtattttcaggtcctcccaaacattttcctgtggtcaccgtcaatcatattttgaaagatgtagtaaccagctatctacaagtagaagaatatgaaccagagctctgtagacagatgactaaaaccatttctgaggtacgtgtgtgatttgcccaaagtgttaacaatagctagaatatttgctaaagtacaacggaccctctacttttttgatgaggggaattaatttgcagtaacagttaaaatgcgtatttataattaggtcatattctacatatatgtgtgtgtgtgggtgtgtgtgtgtgtgtgtatatacataaagcctttgtctaaaacaatcatgagcatcatttgcatgcattatgtaaaagtgtataaaactgccccatttataaaagtgtttattgtaaaagatacaacattttaatgattattttctcttcactaaggcagcttctttgagtgccatcaaatacagacattgtggtcttcaagcacatttctatttttacaaaccccagggctgcacttcatcaaggtttcctctactttctttttgataacaaactctttaataaacattaatgattagttatattacaggagactccagatgtatagtttcttaattagacatgaacaagacagtgtaactccaatgccaacattctttgacatgaagccatcttaacataaattttcaaagaatgtaatttattaaattctgtgttctggattataattatttcatgtatcttagaaaaggttgatttattgctggtgttaaaattttgttcctgaatgttctatctcaaggggaccatgcttgaagggaatcatacttacggttctaaaacaatcactgaaagtatctacaatgcatcatgctattaaattaaatcccttatatttataacaaaggttaatgcttttgagtttcaatgtagctgaatgaagaccctccctttttttaaatttctaggttattaaagcccaggtcaaggacttgatgattccacggtataaactaattgtgattgttcacattggacaactgaacaggcagagcatacttattggaagcagatgcctctgggatcctaaaagtgataccttttcatcttatgttttcagaaattcttctctcttcgctcttgcaaatgtctatgcagtttaccttgagtgattgaaaataagaaatctagctcttacttttgaaaattctgaggcaggctgtatgtctgtacacaaaagttttactgccaaaaactttgagaaagaaacaacactgatatttcaagcaactggaagcttttgaattttttcatattctagtaaagatttggggaggggagggtagccacagaaagaatcttgtttatctaaagcaggaacttgatcttggttttgctggattgctttccatagacatagattcttattaaatatttgttttggtactaattattttaattattctttaattagagtgttacaatttcctgcattgttttttaataaaaagaagctttagaaaaactatggctatataccctgaccaataaatgatagtagaatattcaacatggtatacacaaatgataaataatgtgcctcagtgctgcatataaaagaatactggttttcattttgtacttaataaattgagcagcattcattaagtgcaattattgttacatgtacctgacagttgaaactgctgaggtagaattaatggcttcataacaattatcgtggtcccacgggctgcaagctaaaactagaagctcttgtggcttgcctgcactttacacaattgtgggagaaccgaaagttggctcttcagtaatggaaactataaagtgaataaaggctttttgggacactgaagtagacattgtgatattaaatatacatgatgcttaatactaaatgtgtctgtaacacataaaatcatttattggaaagagacattgcttttaaatatcctaggctaacaaactttttcacaaaatatatggctggcaccttaacaaataaagcatgtgtagttaccattttactcctatgaatttaatactaaagtgacccagtgaggtttttgaatagacgggtgctaaaatttacagggctgaaatagcttattattctgctggttaatgtatcttacgccacggatcatttatttttatgaagctttcaagtctttgtgtgcaagtaaaatgatgttgtggcgttgttcttggatggtaagtggactgcctagaggacatttgttaaaggtcaaagacaaattgtacacatatggagaaaattagcaatgctgtagtcttaaggaaaaaatgatttatcattcatatcaaaaagagtttagcaaatggaaaaccagttaatgctttaattttaaaatgttttggtgtcttacttttccctaaaaatgacatgtagtaaaaaatggatacttttaaaatcccttcccttctgctattttctggcttttaaagtgattattcaaaatgaatttgtcaattttcacttttttttttctgttagtgcattagtgggaatatgtctatgtaataatttatcacaaccaatatttgtcaatctccatagaacagttttcaatctggattagattacacgtataacaagtaaatgagcttcatattttcattacacattggtgaacatctcccttcgtggaacaacagcgggggtaatcatatcactaattttgtatgaataaatgaaaatgaagaaacttctttaacatatacaaagtctattgtaacaatgactgtttgttttagagttctaaattctaatccatgagataatttcttactgtcttccccaggctgtgttgagaatcgaaactgcaaaacatgacggcagttaaaaaacaaaaaagaaagcagtttgccagcatattgctacacactgtaattcagatactcagtgatgaattctagcaattatatagcagtataagaatacatagtaaaaactcactccttgcaactaacttgggagaagctagttatcacacagaactttatcatgagaaatttttaatgaaattatcacacagaaccttatcatgagaaatttttaaaacaatgacactataaatttgaaggaattgttttactttgaaatgccctgaacttccctggtatttttttcctctcctaaagtgccatccttcttcccagaccagccatgcccatccctgctccagagccttcactcatgctttcctaccttggaacaccccctcccacttaagccactttcttcgcttttcagggtcacattcaggtcttaccttttctctcagtccttctctattcactgcttgcctcctgctctctctctcctctgattattctcgtggttgagctcttgattgttctctagctaacttttgaattctagttttgtttcccttactattaatagactgaagacatattgaggacatggaccacataacttgacagtgcctagaaataaaaatcatttttacttttaaagttatcattatgtgcattgcactgtgctacataactcccagctgcatagataatagcaaacacagttcaacccctgaggaactaggatcctataggggtgaaaagagaagtacacaagtgaccacagtataggctcaaatatgttgtcataagaaaaatccagaatatatttatccaattaacagaatcaaggaagccttcatgaaaggaaagaaaatttaagctagactgtgatggagagattagaatttcaacaggcagaagattacaggaagcctaggctggataaaacacagtgttcacgaagataagtggttagaactaagattagaaggaagatggccaaataggaacagctccggtctacagctcccagcgtgagcaacgcagaagatgggtgatttctgcatttccatctgaggtaccgggttcatctcactagggagtgccagacagtgtgtgcaggacagtgggtgaagcacactgggtgcgagccaaagcagggcgaggcattgcctcactcgggaagcgcaaggggtcagggagttccctttcctagtcaaagaaaggggtgacagatggtacctggaaaatcaggtcactcccaccctaatactgcgcttttccaatgggcttaaaaaaatggcacaccaggagattatatcccacacctggctcagagggtcctaaacccacggagtctcgctgattgctaacacagcagtctgagatcaaactgcaaggcagcagtgaggctgggggaggggcgcctgccattgcccaggcttgattaggtaaataaagcagccgggaagctcgaacttggtggagtccaccacaactcaaggaggcctgcctgcctctgtaggctccacctctgggggcagggcacagacaaacaaaaagatagcagtaacctctgcagacttaaatgtccctgtctgacagctatgaagagagtagtggttctcccagcatgcagctggagatctgagagcgggcagactgcctcctcaagtgggtccctgacccccgagcagcctaactgggaggcaccccccagtaggggcagactgacacctcacatggtcgggtacttctctgaaataaaacttccagaggaacgatcaggcagcagcatttgcagatcaccaatatccactgttctacagccactgctgttctacagccaccgctgttctacagccaccgctgttctgcagccaccgctgctgatacccaggcaaacagggtctggagtggacctctagcaaactccaacagacctgcagctgagggtcctgtctgttagaaggaaaactaacaaacagaaaggacatccacaccaaaaatccatctgtacatcgccatcatcaaagaccaaaagtagataaaaccacaaagatggggaaaaaacagagcagaaaaactggaaactctaaaaagcgagcgcctctcctcctccaaaggaccgcagctcctcaccagcaatggaacaaacctggatggagaatgactttgacaagctgagagaagacttcagatgatcaaactactctgagctacaggaggaaattcaaaccaatggcaaagaagttaaaaactttggaaaaaaagttagatgaatggatacctagaataaccaatgcagagaagtccttaaaggagctggtggagctgaaaggcaaggctcgagaactacgtgaagaatgcagaagcctcaggagccgatgtgatcaactggaagaaagggtatcagtgatggaagacgaaatgaatgaaatgaagcgagaaggaagtttagagaaaaaagaataaaaagaaatgaacaaagcctccaagaaatatgggactatgtgaaaagaccaaatttacatctgattggtgtacctgaaagtgacagggagaatggaaccaagctggaaaaaactctgcaggatattatccaggagagcttccccaatctagcaaggcaggccaacattcagattcaggaaatacagagaatgccacaaagatactcctcgagaagagcaactccaagacacataattgtcagattcaccaaagttgaaatgaaggaacaaatgttaagggcagccagagagaaaggtcaggttacccacaaagggaagcccatcagactaacagcagatctctcggcagaaactctacaagccagaagagagtgggggccaatattcaacattcttaaagaaaagaattttcaacccagaatttcatatccagccaaattaagcttcataagtgaaggagaaataaaatcctttacagacaagcaaatgctgagagattttgtcaccaccaggcctgccctaaaagagctcctgaaggaagcactaaacatggaaaggaacaaccagtaccagccactgcaaaaacatgccaaaatgtaaagatcatcaaggctaggaagaaactgcatcaactaccaagcaaaataaccagctaacatcataatgacaggaccaaattcacacataacaatattaactttaaatgtaaatgggctaaatgctccatttaaaagacacagactggcaaattggataaacagtcaagacccatcagtgtgctgtattcaggaaacccatctcacatgcagagacacacataggctcaaaataaagggatggaggaagatctaccaagcaaatggaaaacaaaaaaagacaggggttgcaatcctagtctctggtaaaacagactttaaaccaacaaagatcaaaagagacaaggaaggccatcacatagtggtaaagggatcaattcaacaagaagagctaactatatatatgcacccaatacaggagcacccagatttataaagcaagtccttagtgacctacaaagagacttagactcccacacaataataatgggagaatttaacaccccactgtcaacattagacagatcaacgagacagaaagttaacaaggatacccaggaattgaactcagctctgcaccaagcggacctaatagacatctacagaactctccaccctaaatcaacagaatatatattcttttcagcaccacaccacacctattccaaaattgaccacatagttggaagtaaagcactcctcagcagatgtaaaagaacagaaattataacaaactgtctctcagaccacagtgcaatcaaactagaactcaggattaagaaactcactcaaaaccgcttaactacatggaaactgaacaacctgctcctgaatgactactgggtacataacgaaatgaaggcagaaataaagatgttctttgaaaccaacgagaacaaagacacaacatacccgaatctctgggacacattcaaagcagtgtgtagagggaaatttatagcacaaaatgcccacaagagaaagcaggaaagatccaaaattgacaccctaacatcacaattaaaagaactagaaaagcaagagcaaacacattcaaaagctagcagaaggcaagaaataactaaaatcaaagcagaactgaaggaaatagagacacaaaaaacccttcaaaaaaattaatgaatccaggagccggttttttgaaaagatcaacaaaactgatagaccgctggcaagactaataaagaagaaaagagagaagaatcaaatagatgcaataaaaaatgataaaggggatatcaccactgatcccacagaaatacaaactaccatcagagaatactacaaacacctctacgcaaataaactagaaaatctagaagaaatggataaattcctcgacacatacaccctcccaagactaaaccaggaagaagttgaatctctgaatagaccaataacaggatctgaaattgtggcaataatcaatagcttaccaaccaaaaaaagtccaggaccagatggattcacagctgaattctaccagaggtacaaggaggagctggtaccactccttctgaaactattccaatcaatagaaaaagaggaaatcctccctaactcattttatgaggccagcatcatcctgataccaaagcctggcagagacacaaacaaaaaagagaattttagaccaatatccttgatgaacattgatgcaaaaatcctcaataaaatactggcaaaatgaatccagcagcacatcaaaaagcttatccaccatgatcaagtgggcttcatccctgggatgcaaggctggttcaacatatgcaaatcaataaatgtaatccagcatataaacagagccaaagacaaaaaccacatgattatctcaatagatgcagaaaaggcctttgacaaaattcaaccacccttcatgctaaaaactctcaataaattatctattgatgggacgtatctcaaaataataagagctatctatgacaaacccacagccaatatcatactgaatgggcaaaaactggaagcattccctttgaaaactggcacaagacaggggtgccctctctcaccactcctattcaacatagtgttggaagttctgaccagggcaattaggcaggagaaggaaatgaaggcattcaattaggaaaagaggaagtcaaattgtccctgtttgcagatgacatgattgtatatctagaaaaccccattgtctcagcccaaaatctccttaagctgataagcaacttcagcagtctcaggatacaaaatcaatgtacaaaaatcacaagcattcttatacacaaataacagacaaacggagagtcaaatcatgagtgaactaccattcacaattgcttcaaagagaataaaatacctaggaatccaacttacaagggatgtgaaggacctcttcaaggagaactacaaaccactgcacaatgaaataaaagaggatacaaacaaatggaagaacattccatgctcatgggtaggaagaatcaatattgtgaaaatgcccatacagcccaaggtaatttatagattcaatgccatccccatcaagctaccaatgactttcctcacagaattggaaaaaactactttaaagttcatatggaaccaaaaaagagcccgcatcgccaagtcaatcctaagccaaaagaacaaagccagaggcatcacgctacctgacttcaaactatactacaaggctacggtaaccaaaacagcatggtactggtaccaaaacagagatatagatcaatggaacagaacagagccctcagaaacaatgacacatatctacaaccatctgatctttgacaaacctgacaaaaacaagcaattgggaaaggattccctatttaataaatggtgctgggaaaactggctagccatatagagaaagctgatactggatcctttccttacaccttatacaaaaattaattcaagatgtattaaagacttaaatgttagacctaaaaccataaaaaccctagaagaaaacctaggcaataccattcgggacataggcatgggcaaggacttcatgtctagaacaccaaaagcaatggcaacaaaagccaaaattgacaaatgggatctaattgacctaaagagcttctgcacagcaaaagaaactaccatcagagtgaacaggcaacctacaaaatgggagaaaattttcgcaacctactcatctgacaaagggctaatatccagaatctacaatgaactcaaacaaatttacaagaaaaaaaacaaacaaccccatcgaaaagtgggcgaaggatatgaacagacacttctcaaaagaagacatttatgcagccaaaagacacacgaaaaaatgctcatcatcactggccatcagagaaatgcaaatcaaaaccacaatgagataccatctcacaccagttagaatggcaatcattaaaaagtcaggaaacaacaggtgctggagaggatgtggagaaataggaacacttttacactgttggtgggactgtaaactagttcaaccattgtggaagtcagtgtggcgattcctcagggatctagaactagaaataccatttgacccagccatcccattactgggtatatacccaaaggattataaatcatgctgctatgaagacacatgcacacatatgtttattgtggcactattcacaatagcaaagacttggaaccaacccaaatgtccaacgatgatagactggattaagaaaatgtggcacatatacaccatggaatactatgcagccataaaaaaggatgagttcatgtcctttgtagggacatggatgaaactggaaaccatcattctcagcaaactatcgccaaggacaaaaaaccaaacactgcatgttctcactcataggtgggaattgaacaatgagaacacatggacacaggaaggggaacatcacactctggggagagttgtggggtggggggaagggggagggatagcattaggagatatacgtaatgctaaatgatgagttaatgagtgcagcacaccagcatggcacaggtatacctgtgtaacaaacctgcacattgtgcacatgtaccctaaaacttaaagtataataataataataaaatttaaaaaaaaagaactaagattagaagaatactttgtgagtgtctgggtaagaaaatgagtaatcattaaaggtttttcattaggctaacagtataaatgaacggacgctctaagaaaatgaatatgttggaaaagaacagaaagactctttggggaggtgagaggtaatagaggctggaagaggcagtggcattggaaatggaaaggagaggacagttctatgagacactatgggggcaaggtctacatgagtaggcaaggggaaagaggagtcagaagtgaccccaacacaatatgaagacagttgaaagtttcgagctctggacatttgcagacatttgtaggtctgagtcctgctgtcccaggcacaagttaagtgacctcaaataaattactaatctcactaagccacagcttcttcattgtaaaggaatgataatactgctacctacctcataggattttggtgagaattaaatacacatgtttgctaaactcttaacatcataattcctaatagaaagctctcaatacagtagctcttaagattgcagttgaaagtttcagtatgggtcactagttcaatggacctattaacaaacataaggaagtcagcagagtttgaggaataaaatatgaaatttgattttgcacttgttgaatttaagttaatgatgggatattaagatggggttagcctccggcagctgagaacatggggctggagctgagctacgacatcaaggtgagagatttagacttggcagtcatccacattgagaccgaacatcctcctgctttataaaatattcattagcagaatcttcagcaagtgtagtgagtactaatagcaaattactaaaaattcagttaactctgggaacataaccagaaaccacccctcaaaaactaataggaaattttttttccaaaactaaaattaaatgatgccttcttttcttcattaaaaaaattcccagatgatccatttatgttgtcagacatcataaaaaatgtaagggttctctcaaaaatacattagcatcttgaatggaggtgtcagtgctgtcatctgctgtcattgttaataaaatggctttaaagaaaatacataataggaggttcttccaacagagtccaacagattatattttgggaaattaagtgctagttcaactcctttatttaaaaaaaactcttaagaattatccagtatatgggaatgattttaaaaacaacaacggttgagaaattagagctcgtaaatgtagccatcctagagaatgaacacactctttgttgggaccatcatttgacctgtgtttctagatattactcaaaaatatattaagaaaactcaatattaaatagttattcataatttactatgcattttgctcccaaaattcttctaaaggagtggcctgcgcccgttacctctgattttctctgccacttctttctatgctactttcaccttctgcaatctagttctcatccccactaatgtgttactttcacaagcagtcaaagtggtcccccaggacaatctgcaaaacatttctccagttgcatccacctcagctatcttctgaattcatttcttttgaatcacgttgtaatatagatggttaggttttggtcgctttcttttcttttttttttttttagcataagtttgacaaaaatctcctttagctgccacccttactagctgtgtgtgactttggtttgcggcggctagtgtcttgagccttagtttccccaaaggtaaagatgattatgattactacttatgttcttgtcatgacgactaaaaggaaaagtatgcatagaatatctggcccactgtagatgcttactctcaacctctaattttttcctgcagaaactcttttctaaaaaattgaacagatatttttgcaatttctgctcactaccctaatgtaataccctagattacattttttcttttatcacctttaatcatctgctgctgccttctttgaatgacaatttcttctcaagtccacatttattatacagtcctgtacatctccaaatttagcttctcgtggctgatgtctacctgtttttaaatgtttcattcggatgtcttaactctcacttcagtaatttcttgattcctttgaacatttctgtttactgccgcctattttatcctgttaattctcatttgaatttatatattcctctagtatgttcacacagaataaacatactaaaggtttatttagacatatatattatctgtttaaagtctcctgtaatctcttcttaatttctttccttgccaatttgagtacacttttgttttttaattttagtgcaggatataacttgagacttgtggttttccacccacccaccagggtatttccccacctagcaaggcaaggaaccagtataaccagtacgggaagcactaagcttcactttacatttgtgatcagaaaagttgcccacggatgatgatgagggtgaatcatctaactattaaaaggacagaatatccagcccgatttgtttaggggtttctgggaaatagttttttaaattcctatgaaaaatatcaagtttaaagactcataatttcatgttgaaactaaaggaaaataaactgtatgttgttggttaattatataattatatttatttttttcctttaaggaaatgtgttatataacaagaactttggtagga

SEQ ID NO: 878 - DNA, 2245 bp, Homo sapiens
gcggccgccggctgaatgaagcctgggacgcgggagccgcgccgcgcgcagtgtctgcagtgccggaggtctgggaggctccgggcgaagcctccctgctgcaggttatgatgatgtcagacaatgctaaaggcagagcagctcattcatggaagaaaagagggagtatttcttctctaagtaatcatgaattttggcgaaaggaaattcatgggcgcatcaaagattctatgagtactgtgtcttatatggaagaacccagtcagcgtgatgatatctctcgccttacagttcagatggaaaacacctatcagttgggtcctcccaaacattttcctgtggtcaccgtcaatcatattttgaaagatgtagtaaccagctatctacaagtagaagaatatgaaccagagctctgtagacagatgactaaaaccatttctgaggttattaaagcccaggtcaaggacttgatgattccacggtataaactaattgtgattgttcacattggacaactgaacaggcagagcatacttattggaagcagatgcctctgggatcctaaaagtgataccttttcatcttatgttttcagaaattcttctctcttcgctcttgcaaatgtctatgcagtttaccttgagtgattgaaaataagaaatctagctcttacttttgaaaattctgaggcaggctgtatgtctgtacacaaaagttttactgccaaaaactttgagaaagaaacaacactgatatttcaagcaactggaagcttttgaattttttcatattctagtaaagatttggggaggggagggtagccacagaaagaatcttgtttatctaaagcaggaacttgatcttggttttgctggattgctttccatagacatagattcttattaaatatttgttttggtactaattattttaattattctttaattagagtgttacaatttcctgcattgttttttaataaaaagaagctttagaaaaactatggctatataccctgaccaataaatgatagtagaatattcaacatggtatacacaaatgataaataatgtgcctcagtgctgcatataaaagaatactggttttcattttgtacttaataaattgagcagcattcattaagtgcaattattgttacatgtacctgacagttgaaactgctgaggtagaattaatggcttcataacaattatcgtggtcccacgggctgcaagctaaaactagaagctcttgtggcttgcctgcactttacacaattgtgggagaaccgaaagttggctcttcagtaatggaaactataaagtgaataaaggctttttgggacactgaagtagacattgtgatattaaatatacatgatgcttaatactaaatgtgtctgtaacacataaaatcatttattggaaagagacattgcttttaaatatcctaggctaacaaactttttcacaaaatatatggctggcaccttaacaaataaagcatgtgtagttaccattttactcctatgaatttaatactaaagtgacccagtgaggtttttgaatagacgggtgctaaaatttacagggctgaaatagcttattattctgctggttaatgtatcttacgccacggatcatttatttttatgaagctttcaagtctttgtgtgcaagtaaaatgatgttgtggcgttgttcttggatggtaagtggactgcctagaggacatttgttaaaggtcaaagacaaattgtacacatatggagaaaattagcaatgctgtagtcttaaggaaaaaatgatttatcattcatatcaaaaagagtttagcaaatggaaaaccagttaatgctttaattttaaaatgttttggtgtcttacttttccctaaaaatgacatgtagtaaaaaatggatacttttaaaatcccttcccttctgctattttctggcttttaaagtgattattcaaaatgaatttgtcaattttcacttttttttttctgttagtgcattagtgggaatatgtctatgtaataatttatcacaaccaatatttgtcaatctccatagaacagttttcaatctggattagattacacgtataacaagtaaatgagcttcatattttcattacacattggtgaacatctcccttcgtggaacaacagcgggggtaatcatatcactaattttgtatgaataaatgaaaatgaagaaacttctttaacatatacaaag

SEQ ID NO: 879 - protein, 177 aa, Homo sapiens
MMMSDNAKGRAAHSWKKRGSISSLSNHEFWRKEIHGRIKDSMSTVSYMEEPSQRDDISRLTVQMENTYQLGPPKHFPVVTVNHILKDVVTSYLQVEEYEPELCRQMTKTISEVIKAQVKDLMIPRYKLIVIVHIGQLNRQSILIGSRCLWDPKSDTFSSYVFRNSSLFANVYAVYLE

SEQ ID NO: 880 - DNA, 1638 bp, Homo sapiens
gcgggcggccgccggctgaatgaagcctgggacgcgggagccgcgccgcgcgcagtgtctgcagtgccggaggtctgggaggctccgggcgaagcctccctgctgcaggttatgatgatgtcagacaatgctaaaggcagagcagctcattcatggaagaaaagagggagtatttcttctctaagtaatcatgaattttggcgaaaggaaattcatgggcgcatcaaagaccctggaagtctgtggattacacatacaatgccttttacaggtgggaaactgactataaaggagtagcaatcccagcacatgtcagaagtaaagctaatttgagttttgtaccacctcttcttctccatgaatttttaatatggtgttcagtagaaaagaaattgagtttttatgaataccttctgtattatgcaattctatgagtactgtgtcttatatggaagaacccagtcagcgtgatgatatctctcgccttacagttcagatggaaaacacctatcagttgggttattaaagcccaggtcaaggacttgatgattccacggtataaactaattgtgattgttcacattggacaactgaacaggcagagcatacttattggaagcagatgcctctgggatcctaaaagtgataccttttcatcttatgttttcagaaattcttctctcttcgctcttgcaaatgtctatgcagtttaccttgagtgattgaaaataagaaatctagctcttacttttgaaaattctgaggcaggctgtatgtctgtacacaaaagttttactgccaaaaactttgagaaagaaacaacactgatatttcaagcaactggaagcttttgaattttttcatattctagtaaagatttggggaggggagggtagccacagaaagaatcttgtttatctaaagcaggaacttgatcttggttttgctggattgctttccatagacatagattcttattaaatatttgttttggtactaattattttaattattctttaattagagtgttacaatttcctgcattgttttttaataaaaagaagctttagaaaaactatggctatataccctgaccaataaatgatagtagaatattcaacatggtatacacaaatgataaataatgtgcctcagtgctgcatataaaagaatactggttttcattttgtacttaataaattgagcagcattcattaagtgcaattattgttacatgtacctgacagttgaaactgctgaggtagaattaatggcttcataacaattatcgtggtcccacgggctgcaagctaaaactagaagctcttgtggcttgcctgcactttacacaattgtgggagaaccgaaagttggctcttcagtaatggaaactataaagtgaataaaggctttttgggacactgaagtagacattgtgatattaaatatacatgatgcttaatactaaatgtgtctgtaacacataaaatcatttattggaaagagacattgcttttaaatatcctaggctaacaaactttttcacaaaatatatggctggcaccttaacaaataaagcatgtgtagttaccattttactcctatgaatttaatactaaagtgacccagtgaggtttt

SEQ ID NO: 881 - protein, 61 aa, Homo sapiens
MMMSDNAKGRAAHSWKKRGSISSLSNHEFWRKEIHGRIKDPGSLWITHTMPFTGGKLTIKE

SEQ ID NO: 882 - DNA, 1438 bp, Homo sapiens
gcggccgccggctgaatgaagcctgggacgcgggagccgcgccgcgcgcagtgtctgcagtgccggaggtctgggaggctccgggcgaagcctccctgctgcaggttatgatgatgtcagacaatgctaaaggcagagcagctcattcatggaagaaaagagggagtatttcttctctaagtaatcatgaattttggcgaaaggaaattcatgggcgcatcaaagattctatgagtactgtgtcttatatggaagaacccagtcagcgtgatgatatctctcgccttacagttcagatggaaaacacctatcagttgggttattaaagcccaggtcaaggacttgatgattccacggtataaactaattgtgattgttcacattggacaactgaacaggcagagcatacttattggaagcagatgcctctgggatcctaaaagtgataccttttcatcttatgttttcagaaattcttctctcttcgctcttgcaaatgtctatgcagtttaccttgagtgattgaaaataagaaatctagctcttacttttgaaaattctgaggcaggctgtatgtctgtacacaaaagttttactgccaaaaactttgagaaagaaacaacactgatatttcaagcaactggaagcttttgaattttttcatattctagtaaagatttggggaggggagggtagccacagaaagaatcttgtttatctaaagcaggaacttgatcttggttttgctggattgctttccatagacatagattcttattaaatatttgttttggtactaattattttaattattctttaattagagtgttacaatttcctgcattgttttttaataaaaagaagctttagaaaaactatggctatataccctgaccaataaatgatagtagaatattcaacatggtatacacaaatgataaataatgtgcctcagtgctgcatataaaagaatactggttttcattttgtacttaataaattgagcagcattcattaagtgcaattattgttacatgtacctgacagttgaaactgctgaggtagaattaatggcttcataacaattatcgtggtcccacgggctgcaagctaaaactagaagctcttgtggcttgcctgcactttacacaattgtgggagaaccgaaagttggctcttcagtaatggaaactataaagtgaataaaggctttttgggacactgaagtagacattgtgatattaaatatacatgatgcttaatactaaatgtgtctgtaacacataaaatcatttattggaaagagacattgcttttaaatatcctaggctaacaaactttttcacaaaatatatggctggcaccttaacaaataaagcatgtgtagttaccattttactcctatgaatttaatactaaagtgacccagtgaggtttt

SEQ ID NO: 883 - protein, 72 aa, Homo sapiens
MMMSDNAKGRAAHSWKKRGSISSLSNHEFWRKEIHGRIKDSMSTVSYMEEPSQRDDISRLTVQMENTYQLGY

SEQ ID NO: 884 - DNA, 46202 bp, Mus musculus
  misc_feature (1)...(46202): n = A,T,C or G
catgactctcatttagatgcttattaaggcaaactatgaacataagtgacttaattacactggagcaccttgccaagctgttatcaggaagcatcagggaggcctctggagaggaacagatcaaaatgacattccacagcctggctgggctctgctctgccttctacttgttcatctatttctaatgaggtcaacaggaaaacatgaaagggattaggtgtgagcgaacaggagagaagaggttcctaggatactagggaggcctgacagtggccagagcatccacttctcatccactttcctctggaagcctgggatgtctgcagcagaagaatgtgctgggattagtgagagcacagctctcttactctgcaggagtttaacggtcaaaaaaaggatggctaatcagaagggaagaatggcggagctctttccttcctataaccaaatgaaattattactgttaaagcgacaacttgcctactaggtaagtgggctgaggtgctgggactctttttaaatggaaaagtttaaactgcctggagacagagctcagctgggtacatgagtaaacataacttacccagactattgtagctgcactgaaaataaagctgctttctaccttctgatctcagttctgaagtgttagtggggatttagggggttactggcaattagagaaaggaaaacacacatcctttgatcaattaccaaagaatttttagtaactctgaaattaagttgaagaacataatactgtgtgatgtgattaaaaaacatcacggaactcaaggctgaggactggcacagacagtactagatgctaatctagggcacaaggctgaggcaggtagagtggcagctcccaatgattcaagcctgacaacctgaggttgacagctcacataaagtggggagagagagctgtctcctctcactccctcccccacctgtctctgtctctgctgcttctcccacaataaaataaaaagaattcaatctcaggtctgatttgcactaaaatatctgtgtgtattctgttgtttctttaccgtttgggtcttcagaggtcatttggaagacaagctgcaaaaaagaatacacactgcaaactacttcccagaaatgttacactcacgtattgttttgttactgcagctgcttacattattaatatgctcatcaaatgtgaattaaagtgttattatcacaatctaaccaatgagactatagaatattagggacaaacagcattttcaaaagcatgggaactctttagactgtaaagataatggagaaagcaggaaagcagaacaccagctgtagagcacgcagtctaatgagggaaagtatgtttttgaacatcaatactgtggtagaactgtaaagttttcattttagttttatatattctcaaatatggagtctttatacataattctgcttttcacccctctaacttggaataaagtaaggagtgaggcatggcaaggttgcccatgcctatcatagcacccaggaggctgagcaggagtttgacagtataaggccaacctgagctagtacaagatcctaccaaggaaggaagaagggaggtggagggataaaatgttaaataaactggctttgtcattcagcaagataagtgttttcctttcattggcagcaatcccatgtaggctacagcacacataattttcaggaaatgcctgctttgtgcaagtccaaggttctgctcggtgtcctctggcctaatccttttaaagcaacatatgcaacctgacctggggtgaattcattaactccacaaaccaattaaataaagactagttacgcttttcttcctgttttatgagttttatattttctgttattgctttctcttttatagtatacatcttgtttggcctctctttttttttgggggggggttctctgtagccctggatgtactggaactcactctgtagagcaggctggcctcacactcagatccacctacctctgcctgagtactaggattaaaggcgtgctgttggcttcattttataggttgtatttattattcatctgaacggtaaactggtgggttggggaatgtggctcagagagaacactatcctagtattattaggtcctggattggatcttcagtatcacacacacaaaaaatgaattaatgcaaaactgccttttaatcataaaaaagttcaggtggtacattataaaattaagtctacaatattgattacaaatgattttcaaattgtgtgtacaaagaaaggttcgtagtatataaaacatgtaggcatccacactgccagtttgacaaactggaaagccacagagatgtaaatgttcaaagtatctctggaatgagaaaaaaaagtggttgggctctgggaaaggaaacaggaggtttgaactgtttgccagggtcatttttacttttttaaaagtagtagatgttctcaaagttttcttaaatgataatgaaataattattttaaataaatacaaaaagtgcatgagcaaaggcaaatgagtaacaaggaaaagtctgctctgtgaggagacacgctggggtgctggggacttctctgagcatttccaaacttcaggatgtttgaaattttaatcatgcattttaaaaatgttaccttttaatctaacagtcaatatctagtgttcttaaaactgaaacaggaccaagaattctgagtactaatcttaacattcccaaggctatatcaagagatatttggcaggtcataaatttcctgtattctcttacgagtgaaaagagctccaagggagcaagacggtatatgcctatacctaaaagttgagggggagaacagaacagtttgtgtcctttttgtttgtttgtttttgtttgagatagcatttctctgtgtagccctggctgtcctggaaattgttctgtagaccaggctggcctcaaactcagagatccacctgcctctgtctcccgagtgctgagattaaaggtgtggactaccatcacctggtgagcctagttgttctctaccagcctgggcaatattgcaagaccatatctcaaagggaaaaagagagaagttggttgccaagtatttttatctattggaaaagcggcggtagccaagctaatccttacagaacattttcaaaataatgctaaatattgtctatgagatgaagagagaaaaagttactgatccccctcctgcttccctagcccccctcaaaatgacctgtactttaaatgtgtaagttcaaaattgaaagtactatctgatggtagagcttatgagcccactaaggcccggggcttgacaggctaaacatccactcaagtactcactagctaacgagagagaatactaccacccacctgtttcgcaagcacagcgagcacagcaccagactcccgtaggcctcagtgaacttctgtaacgccctgagccctgcccctggctctgtgaatttctgtctggcttcagcagcagagaacagcttctcagcgatctgctcaggaaagccgatgagggaatcaatgtgatcaacattgtcggagatgaagcccagcaccagactgaagagggacttagcagagtatcgcagattcccctctcgggtgtacgtgaagataaagtgatcggtcttctctttctgtgcagtgtcgtcttccctgttcatgcacagctccacggaaaagcctttgggaaagagtctgaatggtcgtggcttctgcaggctgtttttaacaccatccagagccaggttgaccatgtgtagctgcccattttctcgaacatagatgggccctggatccaggtgggcttctgagttgaggtagtaagccattgccttggttgcaactgtaaaagcaaggtgtgtggaggcaaatccaattagaatgtcatctgcagcttcaccttgctgtgcccacagctttatgatcctaccactaccaggaaagcaagactcaccagttgctgagaactttgtcactatgaggctgttctactgtttttacctgaagtgcctcttttgcatttttctcacctatttagtaatctactcatctttcagaactttgagctcaaatttcatttggagaattcacccagaatttacaaaaaaatgccagcaacaattcttttcaaagtagactcacagcagcacagcttatgttagcagagcaacgaggagcatcaactaaatgcccaacactgagtcctagtaaacaaagcatacactatttcatcagacattatgaacccactagaattctggaattaaaaatgtttacacacagaaaacagtaactccgctagcgggtttggcactttccacacatctctttgttgcacttggctcactgtcttattgattggcttctgggtctgtcttagctgctttgcacacagagagaaagaccacatttaattcagactccataacaggactctggtacagtgcagtcccttgggagaatgtcatggaactagtttacaagttccataagccttaggtaaaccatgagcaaaaggatgtcttgaatttacaaataaaggcctccacaacaaaggctaaataaaatcattacagtcttccagtgttcagattctgtccaagcactttgaggtaagttaaaaaccaaaaagcagttatgtttttctttaatcccactggtgacattatgcatcaagaattataataaatactattttcttgagtgagatttcaaattacacaagaaacttctatgttaaataaaggcatccgattatcatttctacaataagaaagggggaaatgtggattttaataacatgtcagcctatcagtatttctctctctctttttttttgttgttgttgggttgtttgtttatttgttttgtttttgagacagggtttctctgtgtagccctggctgtcctggaaatcactctgtagaccaggcaggcctcgaacttcatctgcctctgccacccaagtgctgggattaaaggcgtgccccaccacacctggctcctagcagtatttctaaaactctgaaactatccctcaaagactttggttgacttttggaggtatatcaagtcaggttctacatcaatacctacaatgtggcctgaagccacttacaagtgtcagcaaacaattaagttagtgacaaaaatgctgagtctctgaagatcaagcaatgatcctatttgtgggaatcactactgctcatttttctcctgagaataattatgtatataaagcacatcagaaaggagggaccagcctagccctggagcctcaccctttccagctcatctactatgttctattctgtggccctcccaatgctacatgggtaaattgccactcacttgacccactggaattagcttagtttactgcttttggttgttctgcctgacctagctatttcctgttcatcattaacattcagctcaaccatcactcagcattctcctgggaaacttctccaaccccagtaccagtccatgtctgtctggttttcccaaagcacccagtgtttccttttagacaacacttagcactgtgtactatgttcaattgttactgtacccaaagctgtgagtttttttctttctcaggccgaacatggtgcttagtactgagtaagcactcaacagatatatgctgaactgaatgagacctcaaaggggtagatttagtgctgcgttgaagggcctgctgatattgttgctaggagccagctcctcttccaggcaacagctgcaggctcctcccccacttgtcagccccttctgcaggtggtagaagcagagcagatgatggggctatattgctactggtactatgtggggggtgggggagggaggacaaaacaactaaagtaaaaaccagttttttttttttaaagtcttgtcatagtgccagttcttacacttcatattcttgccagcatttaagggctgctgctgaaaagatgccctccccacttgctataaaagcttctttcagcagggcaagcatttagccccttcgacctcacagaccttaatcctaacctggagaaaaagaaaatgctctttgatctttaagactagaacctcaagctgggcagtggtggtgcacgcctttaatctcagcacttgggaggcagaggcaggcggatttctgagttccaggccagcctggtctacagagtgagttcccggacagccagggctacacagaaaaaccctgtctcaaaaaacaaacaaacaaacaaacaaaaaacaaaaccagactagaacgtcagagcctactctacctaggtatcagaaagtaaatactacgtatggcataaaaacaaattatttgctagacaagaaatgatcaagtgggtaaatgaaggaaagaaaacatatcattatcaccattttagagtggccagaaatttagcatgtagtccaggctggcttcaaactcagagagatccttctaccatggctttccacatactgggattacagtcataagccactacacctagcctaacaatctaactgtaacagcagaagggcaaatcctatgaagataatgtatcttaatggaccaacacaccataatactgatgaggaggacagaaagacgaaaacccaggttttacatatttgcactgctcttaattctcctctctaacgtcccacaaactttggagtaaaacggaatgaatggatgacagtgtctcatgaaaactagaagtatgattccatccagcagagggcacaagtagcgtgggaccagagtctggatgctaatcccttactctgcccctcctggcaactttacccttcaaaaacaggggcacagtgaggactaaatcacatcttcagactacttatcaaacagtattctctttttaaatgatgtaaaaattcagtatttactgaagagtatatctacatcatttgtccaggcaataatccaaggctttgctttcttcagttatttgaagaactactcttaatttagggaatcatgcatggtaaccttttttttttttttaaaacatcctgcattcttccaataaagtacttcctgaagtttgtaatgtactataaaatgatctaaggattaaatgaatgtctgaactttcaactttaagaaccataaagggtaaagcttctctcctggatattgcttgcccgtcactattattcatgttggcctctacaaactggccccttaaaagacaagagccttttcttgcctgggggtgtgaaggttggaagtgctcttttaaactggaaagttaagataacatgtatctgcaagataacaatgttcagtgtagatctcttgcagctatgggtcagattaacagagtgactggctgactggcggtgttctagcccactacagagaaacagctctgtgatctacctaagcattacaaagcattaaaaatgtacagcagtgcattcacattacattagtgaagctaaagttagcacaaagcatatcatttcttcaaataaatgaaatataaccttggtacattaaaaattcagttctgtaaaacatctttaaatgagagaaggataaaataattgacaaccaaacataagttttaaaaccttgaatccagcttccaagcaaaaagcataaaattattccagacaaagagaggaaagaggagagaggcatcagggtaatagtgctaaaactgtgagctgagcctatggttcaggaaaaaaaataccaaaaccaaaaatcagaaagaacacctaaccttaataaatcagtcttctaagaataagtaggccaaaataatgatcaacaataatgattccagatgtgactgaaagctaccattttttatatacctacaagctaacaagcactgtaaggtacaacataaaatgatgtcatgcaatcactgatcctatgaggtcagtattgccactttatggatgaagagcctcagagaaatgaaggaacttaaggctcacaactcctaagtgagagagcctgaattcaatcacaggtctgtgtaattccaaagcacaagatcttcccacttgtatctcaagaataaaaatacaacatcagccttaaaaatattcttaaaacactcaaaattaacatcaccggccatttgatctctctggaactcacaatggctcaaactgggagttaagagggcagggactatagtaaaaaacagtggtcatctgaggaagagtgggtggaaacagaaccagggctcactcaaggatgaagcgctcccccttcactctgccagggcagaaatccgccatatccacacaccaggaaaacatctgtcaacccactaccttcatctcaagactgcagacacctttggctcatttgaaaatgtagtggtttttaaagactttttcttaacataggaagaaatccgaagagaaagtagttccaaagtatctctaaccaactaacaatccatcttcattgttctgtgtcaccgccattattcaatttcccactacttcttttttccctgtaacttgccacttccctacctgccttctcccccaaactgcagaaactcatgtcctatccgggcccatactttgtccaagagcaagctaatctctcccacatcttgatagttttacccactctttagcttttcaaacagaaaaaatttcagtcccccaccccccaaattctaaccttccccattcactcccagatcttctacccatcttcctcacatcccagactctcccgtgcccctcaaaagactcaaccccgcctccacctgtcttctagcgacccgtctccagcccccatccttctctccctcctcacgagtcttcctctcaccatcgaggttcctcttagcaccctagtctccccatctctttcccggttttgcgtcctcaaccttcagattcccctttcttcacgcctcactatctccaacttcccaatccacggcctcaactagtttcttccctgcccccccccgccccacccctccccctattccaaccctagctccttcccttggtgcactcctcaaccccttttctttccccctttcccggcactcccacccaagcttctccccaagtccacctaagctaaatccgctccctctcccgcccagaaccctaaattctcacacaccctcagtctaacccgggacgccgcggaccccacccttaagcccacctcaggcacccctacctcttcatcctcccacccctcccaccgcgagctctacctcgtccctagggcctttcccctcccccagcccctcacactccgcccccgcacccacgcgctgcctgaggctcggcgagcggcccggcccgcggccgccacctacctgtgcccctgcccggggcagcgagcggctgcacctcactggcggctccttcctccactgagcggctgaccgggaagcggctcggcaacctaggccacaaagcccgtgagggtgggacacacacagagggtggcaagagggaggggctgggggcgacctggcgccgcgggactgaggtaccagcagggaggggtggggggggaaaagaactcggctgggtaggcgcgcgtgcgcggggccggcatgaggggcgtggtctgatctggagtgggcggggcatgtggcggggcggggccgggagtgggttgggacagccgagctgagaaagccgggcggtcgcaggaagggtgaaaggggcggggcggggccgtgcgtgtgcgtgcccgcgcgagggcatgtcccccgagatctcttggaggcccccccacctccccgaggcaatgcaatgtaaaggtagtcctgaggaaagacgcgcaagtgaggtggcgcttctaggcggagcccctgccaggagagggcggggcggggctgcgcagggcgcgcgcctgggaactcctctgaggctgaggcggggcgggagcgaagcgaagcgaggcggggcggggccagggccgggcggggcgtgacgggcggggatcgcgagcggacccggtcctttcgcggagctacccaaggcccaggcgagcgggtccgtgcagcacggtgggcgggcaccgaagaggtgggagcccggtggcgaggccggcggagggttgcgggcgggaaggaaccggttgtgaggagacgcgcggcgggtgaccgcgggtggagcagcgatgtcgctgggagagaacagagtgattagggcctggcctctctctaggcccccctccccaagaacttttagtgccctgaaatgatgctttgaccctcagaaggaagaacaattacaaatgacagttaatatgccaaacgtaacacattatcagcacggtccaacctcaaacaggaataatatttaaagtcaatgtgggtgcatttacgttatttgaaattatttgagtcttggaggtgagaggactgtgtccgggctgccattatgggagaaagagaatgaccggttttaaatttacaccagagctaccagtggatgctgtaggaaaggatttggggcaggcagatgtaagagcacacagacccaaaggtgctggtcaaggagaaaatcaacccaggacgtgacccagaggttttctgaaagaagtaccagaaagggctacactgtatatttaaagagaaaatcaatggccctgggaaagggtagggaatccaccgtccctgtctgtaaaacccagaaggatggatggtgtcctagagcctactaccactttggtagagagtccctgagggtattcatcctcgcttagatcaagcattgcctctcaaacctccatcttggagctgtgtggaaacatgtctgctgggtggttttatgggtttcttgggattggtttgcctctttctcattaactgcaacaaaaccttaatgaaagccaaatctctgcccctggttttaaagaacagatattggtagttcaggtatattcattttttattaaagtgctttatattcactgtattaaagtgcttgtttgctttttccttagatcatttaagaataaggtaaaaaaaaacctgaaaatttgaagagaacacactgtatcttattcatctactatatacatagatatgagaacatttccctagatggtaactcttttatttattttggttttttgagagcaggtctattctagcccaggaaaaccttaaactcacttctaatcctccagccttgacctacacagtatatggggcatcacccctgacttgtaatttttttgaaaatgtattatgctcccttatacattatttatccacatgagatatatatcctgtatttacctgttttgagacattcacaccaattttgatagtaaaagtagaaaatataaaaacaccacaattttgtcaaccttttgcaggggatgtacatctttaatgtatgcataactggagggggcactggaagttttaaaaaatgtttattacatttattcatttggaggagcatgcttatgagttggttttttttttttttaatctgccccgaacagtatggaccttaatcatgtctttgagaggttctgaactgagcaccgtactctaggtgtgaatcacattgttagcacccagccactagttgtgtgtgtgtgtgtgtgtgtgtgtgtgtgtgtgtgatcagcttgctgtatcagcattataagtgcctgggcccttagtacccgtggaccccttactgatggaatgtgctacctctttaacttcttaagttgcgtttttattggctgttgggtatcaggcctggggcccatgcctgcccagtgtcactttcccattgtctacaccttcagcctaacttttagtaaatctaaaataatactttttttttttttaaataacacttttaaattttacctttgggccagtcttgtcttagtcttgtcttatgttgatttttgtcatggactaaacaagttaaattttaatacatctagatcaagggtcataaaaggccaaacaatattttaggctttatagtctgtgacagctactcagttctgccatacaaaggcagccatagacaatatgtaaattgatggatataaccttgtgccaatgaaactgttctatcttgttcactttctctccctttctttttgcctctctccctctccttcattgaacccagggtcatgaacatgctaagcacaggctatacaactgtattatacgcccctgcccctccagcatttcttttgagggccagttctattacttagcatataagctgacatctcagctttgtcatgtctacagaattgataagcacacttcttatgcccatatttaacaatgatgttatttcaaatacctttatttaattctgctccccgcttcctttgacaataggatcttattctgtagctgaggatggcctggagtttactatgtagcccaggctccctgcccacttgtgataatcttgcttttagtctcctacatgctttgattatagatctgtaccactatgccaagccacataagttttggatgggattatagctcaacagtagatcatgtgcctagcattctgaaagccctgggtttagttcttagcgctataaaaataaattcaaattttaagaagtgccgaatagtacatgttcattttgttttgctaataatcattctctgagtgtagctattcaaagagctataagtaattgttgaagtattgtctgttattcagcctatattttcctggcccaaagtgtatcttgaaaatatttgttaaaattttcagaaacaaacatgttcctaattggtagaaactccaaggaggaaaaaaagaaagttactttggtataatttgatagttaatgttattattaccttcaattttagcttgtgtccacattttcaatttgtaataaactaagagttttgtttgtaattagcatctaggtccatcagcatgtatgtgtatatgtgtgaaccctcccaaatggtgcaactctctgagagtcatgggggctatttttgttcaaaccaccataacatagctgaggtgctccagcctaaccttatggggnnnnnnnnnnnnnnnnnnnnnnnnnnnnnnnnnnnnnnnnnnnnnnnnnnnnnnnnnnnnnnnnnnnnnnnnnnnnnnnnnnnnnnnnnnnnnnnnnnnnnnnnnnnnnnnnnnnnnnnnnnnnnnnnnnnnnnnnnnnnnnnnnnnnnnnnnnnnnnnnnnnnnnnnnnnnnnnnnnnnnnnnnnnnnnnnnnnnnnnnnnnnnnnnnnnnnnnnnnnnnnnnnnnnnnnnnnnnnnnnnnnnnnnnnnnnnnnnnnnnnnnnnnnnnnnnnnnnnnnnnnnnnnnnnnnnnnnnnnnnnnnnnnnnnnnnnnnnnnnnnnnnnnnnnnnnnnnnnnnnnnnnnnnnnnnnnnnnnnnnnnnnnnnnnnnnnnnnnnnnnnnnnnnnnnnnnnnnnnnnnnnnnnnnnnnnnnnnnnnnnnnnnnnnnnnnnnnnnnnnnnnnnnnnnnnnnnnnnnnnnnnnnnnnnnnnnnnnnnnnnnnnnnnnnnnnnnnnnnnnnnnnnnnnnnnnnnnnnnnnnnnnnnnnnnnnnnnnnnnnnnnnnnnnnnnnnnnttagttaagaaaaatatacacagaaatgttagaacatgtctctcacagtataactacagctttcagtactcttgatactgctttgaagtataatggagagtgaacttttttgttaatataaaaaaaccaaaaagaaatggaataaaaattgtcataattaacctaaggcctacaagatgctcagcggggaaagtgtctggtatacaaacctgggccatttgagtttggtccccagaacccaaggtggaagacgagaactgactgactcttcagagttgtcctcaaagtttcccagtcaccacaaaatttacacctacagaagcatcataatacacactcagaaataatagtaaatacaattattaaaaagtatttaaattataaaaatgattcaagaactacaaattttggaatttaaaaaaatggctctagagctgggctgggtggcacacaggtacacacctgtgatgctagcgctggggaggctgaggcagaagaatcactggtttgaggccagcattataaacatggtgacaacttgtcttaaaaaacaaataaacaaaaaactaggccctataaacacttaaccaggtatggatcaaaaaacctctctctctctctctttctctctctctctctttctgtgtgtgtgtgtgtgtgtgtgtgtgtgtgtgtacacttgcacaagttcaaagccagcttaggctaaataaaaagaccctatttaggaagaaagaaagaaagaaagaaagaaagaagaaaaacaaagtgtattgtattctatcatttgctttcagtctgtgtctttataaaaagagagtgagtctcaaaaatattatttggttgactttcaagtccagtctaataagctagtacttagtttattaatggtaagtggaaggatactgtatttatgtttaaatctgtgttcctgctcttttagtatagtcaaatgtttttctggtattgcatttttttttctcccctgttggcttttctcctagtctgtttgtgtttctgtaataaaatacttgaagctgggtgacttgtaaagaaagtaggtttgtttaacacactattctggagagccaagagcttgctaacatctgcttggtgtgggtaagggtctcataggtgataggtagcatgtaggggaaaagagatgtcacaaggccagaggtggagctgggcggtggtggcacacacctttaatcccagcacttgggaggcagaggcaggtggatttctgagttcgaggtcagcctggtctacaaagcgagttccaggacagccagggctacacagagaaaccctgtctcggaaaaaaacaaacaaacaaacaaaaaaaaaaacccaaggccagaggtggaaggaagcaggagagcgggaaatgaatccactcctataaaggcagcctactctctgagacccatgttagcagtcactttaagaggactgcattgtgacctattcacctcccaataggtttcatctcttaaatggcccaccaccttccactatagatatagtagagtccaaactcccaccatttgaaccaaagaagccttctgtctttatttgttggttttatctttattggttactgtacaatcctaagattgtgacatgaatccttaacatcctggtgtttctctttgcctgtctttgtctggttttgcagtcctgggatctaaccccagccattgtgcatattgggcacccctcctccatgagtaaagtgcacccctggaggatcagtgtttgcagagatacgttactgtggttctttctctgactgctttgcctttttttttttttttcagcaacagactaatcgtgcctaagtagaatcttcaatgtgtttgttcaatttaaatttcagtgttatttgcagttgtaaatttatattttagattttgggaaaatgttaatcatctttctttatatttttctcctgcactattcagtttctctctcctagatgtcaattctgattgtgcacatttcagactgattgatattattttataggtcttatgttctgtccacttatttattttttaagataatttatttttattttctgtgaatatgcatttttgcctgcatgtctgtgtaccatatacatgtatgttttctggggattgaactcacattaggcatggctggaagcgcccttcctgcctgagccatcttgctactccactgatctttgattagtgctaaattctatctgatgtttagcctagctaactttttttttttttaactttacataactgtagttttcaattcaattctgaatttctgtgttgttcttttgggttttcatttctcttgtaaaactcactttctgttcacccattttgtctgtgtccttactaaattatttctatataggaatctttgtatcttctgatataagctagcgcatgggtaccaccagcacccaagtcatctgctgaggtgcttctaaccttgcttgattcagtgtcttcaacagaaggtggagtaaacaggtcattttttaccctagagagttcagatctttcacatttttttccctttgtttaggggatggcataagggacaaatcggttctgcttctttagaccatgttgcaattgtaaatacgtttaatttacttcttacttcaaataattaagcagtaagcttagtttctcctccgttttgtgtgtcccttctgtacacaagaccaaagaaaccttcctttgctttgcagctagcagcagcttcctgtggggcttcacaggagcctgtttctgtgatctcatctcaggtgacatgcatgggggctgtgctgcagctgcacctaactgtacttaacgtacatacgacatgataaatctcataaacacagtgagggaaagaggccagatacagataagcctgaactgtgattccatgtacttgaaacttaggcagactccacccacagtgttagaaagagaaccactgctccttgtggggaggaagaaaggtagtaattgggaaaggatgaggaagacttttcacaagctctaatgtttctttaccttaatgggtttgatttgtaaagttttattgaatacattgcttgtggtctggtcccttttttatgtgtgtgttatagttcagtaggcaactcttgcatcaaaaccaaataaagctcaaaccaagtatggtgggacatatctataatcctagcagtcagaaggttgaggcaggagaattagagttgagataatagcaagaacctgtttcaaaacaaagttaaaaaagaaaaaaatcaagcatagattgggagaagacatttataaagacacataaaatagaatttgtatgtagactattgctaagattttttcgtatgtgtgtgtgtagaatttgtatgtagactattgctaagattttttcgtgtgtgtgtgtgtgtgtgtgtgtgtgtgtgtgtgtagttgtgnnnnnnnnnnnnnnnnnnnnnnnnnnnnnnnnnnnnnnnnnnnnnnnnnnnnnnnnnnnnnnnnnnnnnnnnnnnnnnnnnnnnnnnnnnnnnnnnnnnnnnnnnnnnnnnnnnnnnnnnnnnnnnnnnnnnnnnnnnnnnnnnnnnnnnnnnnnnnnnnnnnacacatgtacacatccccccaatctggttactatgcatctatctgcatcagaacaggtatgtaaagcagaggataagatctgagaaacttttctgttttaccttctaatagcctctatactggagctcaataagttccttcagcagagatgaccaggtgactagttcagaatttcttttaaagaattatttattttggctgggcagtggtggcgcacgcctttaatcccagcacttgggaggcagaggcaggcagatttctgagttcaagaccagcttggtctagcagggtgagttccaggacagctggagctatacagaggaaccctgtctcaaaaacaaacaaagaaagaagaattatttattttatgtatataagtatactgtagctgtgtcagacacaccagaagagggcattggattcctactacaaatggttgtgagccaccatgtggttgctggggattgaactcaggaccacttaaccactgagtcatctcttcaacccatagttcagatttttttttttgtttttgttttttgttttttaaagacagggtttctctgtgtagccttggctgtcctggaacttgctctgtagaccaggctggccttgaactcagaaatcccagaatttttaagtaaggttatcactttccttatctcatgtttctattcagaaaatgatgactgctgctgttacagatccctgtaattttagctgttggagagactaacggagggggatcacattagcctgggagttctgaggacagcatggctaacaaagcaaaactcatctcagaaaagcaactaaaagcagagtgtcagatgtaaatgagcctggggtggtgggcagacctgagaccccaactcacagggagtagaccagaaagatcctgaataggagagaccttgtatttgctaccacccctaaaatgcagccaggtgtgcatgcttatgcttgtagaggccagaagataactgtaagctctaggccagcctaggctagtagtggtttttagaccatcttgggctacagagtgacccagactgggaaacaaaaaccctaaaagtaaacattgttgatacttggattgataagcgtatagatactcacaaaatacctgtttttagcctccaaacttaaaaaaaaatacagctataaacagtaagtcacccataatttatgtcaccatacctgttatctaattactgagggttttaattttagaagtggaataatgatgtcagttcaagtaatcaaagacatttcgtggaacatagcaatggaaatgatcatattttataggtcatcccagagagagagcagaagtttgcggaaacaaaagtgcaagtccctcccacattttgaatagcttggtggttaaactgtgtgctaggcaacagccttgctttgccttctgttgagaatcaagagtttgcctttttattactgtatgtttataaaaattgcaggctaaccattttgaaatgaggaaagtggatctctgctcagtcactgaagggacagaagtgattctggccacatcgagtgatgaaaagcacccacctgaaaacatcattgatgggtaagcgggcctcttccttctgtcctgattccagggttatgttaggtcagggagcccctatttcatagtaactgatactgtgaagcagtttaataagtatttagtgagctagatggcttcataatatctatttgtggagtcattattgaactaatttttttgtaaatacattttttatctttgtgcaaataggttcgatttttaaaaattttattctttttcactgctggaaattagaccagggccctcccatggtagacaagtattctacaatcatgctgtttccccagcttttgctttttttttttttaattgtaatttgggttttctaagtcggggtcttaactgtgtaacctagatttgtcttagattcaaatcctcctgtctcagagtctagaagtgtagtgatattataccatttcaactttgcaaagagacgtacatgtgtgttctaagatttattccttttcattttacatatactagtgttttgctcatatgtatgtatatgtaccatatgtgtgcaatgccaaggacagagaggacaccagatcccctagaactggagttacagatggttgtgaactgccatgtggtgccaggaactcaagccaggtcttctacaagagctgacagtgctcttaactgttgagccatctcttcaggccataaataggttttaaaaggtgttttaacaagacaaaaaacaagacagcaacttcattttatggaagagtaagatttaatatctggttttggtttaattctagatttttttagaaatacaagtatatagccgtggtcacttcctgtgtactgtttgcttgcttgctggtctaagcggtatctctgctgagctgaatgcctcacttcttgcccctcctgcatccatcgtgtgcttcattccagtcctgcttggcgaggacgtagagggaagtcgtattctcagacctttcattccaagaagagtggccaatggagaacacaccacttttgtttatttctaatttttattttatatgtgggttttgcctacatgtatggctgtgcggatatgttcagtacctagaaaggccagaagaggatgtcagatccccttggctggagtttagacctctgtgagccactgtctggcttctggatcttctgggagagtagccagtactctctctagactaagaacacctcttttaaatagttctggcttattattcttaaatcctttcaatttgtgtacatacccacactggactggtggaatcagatcattttagagctgaaaggatttattagagtatctttagtttagacttggaggaagacaggtggactcattaaacactgtttaattattgaggcagagccagttgtaagatggagatgttataagcctccatattctattgtgcttagatgagatcttgacaatgaaggtcagttgctgctcctctctcacaccttcccctcaggtgtgggggctttgctagactccaggaacattagattttagtctctattatgaaattggatgatttgatttttgtttcttttttttttgtaattgtttatctgtaataatatgtcctctctcaggaattcttagaaatgtgaattagaaatcagcctgggctttgcttatctttgactttatagaatcttgaactgtttgttgactaggtttttgatttagaatacaaatatttgttaaacttggctaatgttaaaaagcatgcgggcaggggtccatcccataatcagccaccaagcgcagacactattgcatacgccagcaagattttgctgaagggaccctgatatagctgtctcttgtgaggctaagccagtgcctggcaaacacagaagtggatgatcacagtcagctattggatggaacacagggcccccaatggaggagctagagaaagtacccaaggagctgaagggggtctgcaaccctataggtggaacaacaatatgaactaaccagtacccccagagctcgtgtctctagctgcatatgtagcagaagatggcttagtcggccatcactgggaagagaggccccttggtcttacaaactttatatgccctaatacaggggaaacaccagggccaagaagtgggattgggtggatagcggagcgggggtggggagggtataggggacttttgggatagcatttgaaatgtaaataaaaaattggaggaaaaaaatggaaaaattaaaaaaaaaacatgagggtgcatacacacacacacacatgtgactgcaaatttgtttaggacttttacaatttaggaagtagtaagcatacataaaaacggttgtcaactatgcatggtgtttcatacctataatcttatgttattgggaggctgaggaaggaggagaattgccttgaattcaaggctagtctacactgcagaatgagaccctgtctcaaaaaaagcaaggggaggcagtaaagagaggtctcagaagtttagagtacttgctgctcttggagaggactagagtgttgttcttagcatctgcctcagactggactcagttggtccttcaacccgtgggagaatgtcggtggggtgacaaacagacacaaacaccagagagagtgttggatctgtgtgtaatttctcaaagtgagcatcagacttatattacagaagaaaacaaggaagtttagtgatacattgaggtcatcaaaggtacatgaggttacctgatgcaaaaatgactctttatacaaaacagaggaatgcatacataaaagggaacaggaaccatgcagtgtttacaactgggataaaaaaatcagtgtttacaactgggatgaaaaagagccccacctaaggtcagtttattcttagaagccaggggcaaggacatagttattccaccttttacctaggccattgtaaatttctatatatgggagtgactcagctgtttttctaagtatttactctagttccttcttagaccacaaccttccttcttcctaggccattgtaaattcctgcgcataggagttattctaagtttactttgtagaactagccctgagatttctaggtcttttttagtaaattgtaatgccggatttctttcactatctacactggaggcatttcgtctgaatgaataaatttaaaactcgaggtcagctcaatgatttcctaggatattggaacagtggtggaggtcaatctaacttagcgatatgtcaaatcattccttggaggcacttataataaaataatactgaaagcacacatatctgttcaccgactaacacaaggacaagtttggagcattcatgctaccggataccaaggatccaggagactaaatttccatgaaactctttgcctcagaactgtgtccaagcttttgggtctgtcactggcgtgggtgtagcaagcatccacattagatggctcacaacctgtaactccagctccaagggatctaagaccctcgtctgacctctgggcacctgcatacatgcagcataaacacacacacacttgagcacatggactcatacacatacgcataaatacagtaactaaacttgttttaaaagtatttttggctgggcaatggtggtgtacgcccttaatcccatttcttaggaggcagaggcaggtggagctctataagttcatagccagccttgtctatagagtcaggtccaggacagcctgttttcaacattaataaaaagggtaccaaaggtaaaatggtttgttaaaaataatacaaataaacgaatgatagaatcaactaacatgcatgttttctaactctcactaaagggttctatataacacaaatgtaaggcttgaataaaaaacttaatacctgcctttgcctgtgtcataattcctgtgaaaggcaagtaatagttatttatcccatgacttggtatagaaaaattagtgtacatatacacagaactgcagaactttgtctttaagttgttcatttagaatagagaactttccagaatgcccttcactccagttggagatcattttcctaaggcaagatcaggacctcctccctttctaacgcctttaattaaaaagagttacttgtgtgtgagtattttctgcaggtatgaatgtgtatcttgtgcatgcctgatgcccatggaggccagaagaccgcatcagatcccctgaaattagagttacaggaaattgtgagctgcagtgcgggtactgggaactgaacctaggtcctctgaatgagaagtcagctctcttaactgctgagccgtccattcagccacaggaatttttgatctctgtagtcctagcgaacacaaacaggctttatataggcattaaaattattttatgctcagaggttgttttatataattggaaatagctacagagttacttggagaaaatggtgctgtaaatgtattcccacagtaaggattatcgtatgcccctgctgcatactttaaatttccttagaggttagttgtactgtttttttgttattgtttgtttgtctgtattgttattttgaaatagtctcatgtggtcaggctggcgtggaaccactatatagccaaagatgacctggagctcctggtctttctgcctcttccccaagtctggagattacacttggctagaaagaaggagtcaaaagaatgtgtttatttctcctgaccccacctttgtcctctgtacctagtatgccagtgaaaagggaggacagaaactccacagagaaaacaacaaagctaggtgtgagatatctcatacctggaaccccagcatttggaagactgagacagcaggggttcatcaaagctggaggccagcctaggcaattttgtaagatattgtttcaaattaaaaaaaaaaaaagataggactataattgcacacatgtgatctgagctcagttcccagtacatattcacccaccccgtgctttgaaaaagatgtggtcctttttgcaagtacattgaatactatagttgagtcatataaatagaatcatatatatatatattgtggtttgagctcttttaaaaacaggatgtcagtagctgaagcaatttactgtgtagcccaggccagcctcaaacccacagcaatcctcctgccttagccttctaaatgctagagttatagatgtgtatcaccatgcctgtctcacatgagatctattgcttattggttttgattttttttttaatttatgagtatggctgctttgcccatataccccatatattcctggtacccacagagtctagaatatggtatcagatcccctggcactggcgttatagatgcttgttgtgagccatcatgtaggtactgggaatcaaactccagtcctttgcaagaatagccagtactctttacctccgagccatctctccagcccctttgtgtgtgtgtgtgtgtgtgtgtgtgtgtgtgtgtgtgtgtgtgtgtgtgtgtgtgtttatgacaaagtctaagtgtggggctgactggcctgcaactcttggtggaaatctgactggccttggacttgccaggatccttccatcttggcatgaaccatcacaccacacagagcctgtacgctgctgtgaggttccttccacttacatgatttaaggttcctccgttttgtagtaaatattactactatttttttagatttatttatttatatgagcacactatagccatcttcagatattccagaagtaggcattggatctcattacagatagttgtgagccaccatgtggttgctgggaattgaactcaggacctctggaagatcagtcagtgctcttaacctcggagccatctctccagtcccatattactactatttttcttattgtcaaatattcaaatacattgatagaacacatagtacttgtgcatttttaacttgaaagacatttctacttttccaattttacttaaaaacaccagcttagggctcgtgagatgactttgcaggcatggaaacctgcctgaccatctgagtttgaatgccagaatccacagtagaaggagagaactgagtcctgaaaagttgccctctgacttccacttaagggccacagtttacaataataccttgctctcacacacacatactaatactaatagcaataacagcaataataatacagacaataaggaaattcaatataaagagaaagtatgcattagcttacagatctaaaacctcaggaatcctcaagctgggtaaatataaagactatgtcccagcaaacactgaaaaagaaagaaatgtgtaaacagctagagagaaaggctagcgatttgctgaggcacagcagtgctgatgatatcaggcctgctgagtagagagagctcctaggcagtgtagtgtctgacagatgctgaacagaacatgcaaatagacacaaaactgtcaacccagaattctttctcttgctaaaacatacttccaaagtaaagatattttatttgttacaggtaaacttgcatggcaaaaaatattaaatgaactttgcaattagaagaagtatagtaccagaggaaaactcaaacctatatgaaatgtactagtaatagtaaatatttggataactgtaaatgactatatttttctgagtttctttagagatagctaatcactttatgatttaaaaacattatattgtgagattaactatatgtaaaatatgtgacaatagcataaacttgaggttctgggtggtttgactatcacaaagctctctcttttccccctttcctactttttcatgtgtttgtgtgtactgtgtatgtggtagtttgaataagagtggccctcataagcacatatattgaacacttggtccccagttggaggaactgtttgggaagaattaggaggtatggccttgttggaggaggtgtgtnnnnnnnnnnnnnnnnnnnnnnnnnnnnnnnnnnnnnncacaccattgctagatagctctttgccgctaaggatgtaagctctcatcttcttccatgccatgcgtgactgcctgctgccatgctccctgacatgatggtcatagctaaatctctagaactgtgagtccccaagttttatttttttatatattgcgttggtcatggtatttatcacagcaattaaaaagtaacaaagatagtgtacatgaatgtgtgtgtgtgtgtttctctgtgtatgggtgtctgcggaggcctgaggttgatatctggaatcttcccctattaattgttcttccacttaattcattgaggtgaggtttctcagtaaaatgcagcgctcaccaatgattcagctggtcttgctagccagcttggtttgggcatcttttggttttgacttctgaggctggaattatgggaaagctgctgtgtctacctggcattgatagttcgagagagccagactgtctcccttgctgtcgtggtaagaactttagctgctgacccatctccccagtcccacaaggtactaatacagtaactttgggaataaccactataacacttttaaaaacaaacaaacaaaaagagccaccctgatgtcatggtgtttacctgtaacccttacctgagagcctgagataggaggaccaaaatttgaggctagcttaaactatgtaacaagacccttctaagaagtgggaggtggtggagcatggcagctctgcaaacttttaatcccagtgcttgggaggcagaggcaggttgatctctgtgaatttgaggccagcctggtctacagagtgagttccaggccatcagagatacacagtgaaaactgtcttcaaaaaaacaaaaaaacccaactctttctttttgtgtgttgctatgtcacccagactgagaaagatccagaaacttcatggccatgactgtatgtgtcagtcagcattagaagcagccaggaggccagggtagtactgataacatgcatcaccacaggatcaactttgacaaataccatccaggtgacttgggagttagtatgaggcgttaccacttaaagaaggaccagatctgtgaccaaccctcagcctgaataagctttggacattggtcactgagaattggtcagtaagtcggtaaccgctgcctaaagaagactggagctattccagtcactgatgtaatatgatcctgataccgcaaagttctggggaagagaaagttccctaagccgcctgtcatcatggaagccacatgcttcagaaaaggagctcaggagattaagagtgttgggggtttctgtgtcctgaaggcttgaagccacatacattaattaaatgctaactatctttaaaacaaaaaaacctaaggggtcagagatacggctcagtacataaaggtacatgctaccaagtatagtggcttgagctcagtccttgagacacacacagtgaaggaatagtggctcctgatagttgttcctttcccttcctcttcccatgtgtgccatggaagtatacgcacacacgcgcgcgcgcgcacacacacacacaagaaactaatcaaaaatataacatgtcaataggtggaaaatgagtgagtgagaaatgatcttccttacaaactatatatttgaaagagacttaattacattcataataagtaggagataagacagaagattactagaaataaagggatattttatactattagagggtcggttacttaggaagttacatttctacatgtatgagacctaataatcaatttttaaaatttgtaagagcaaaactgaaagatgaaagaaatctacagttgggtattttaagactgtcctcgcaataaaggtagagcaacatgagctggtaaagattcagatgagctgtagagtgttatccaatatcttgatgaattgacctgaaatactggcatcagaggtggcgtattaatcaagtgcacattgaatttccctgaatttccctgaataggtcccatcagactcagagaactgaaatctgaagagagtgttcttagctgggaatggtcgctcccacctgagatctcaggacttagaaagcctccgagccccacggggaggccttgtctcaaaaagggaaaaaataaaagcaccatgaagtttcaacttgggaatttagaaaaaaggaacaaactaaatgcaaagaaagtgggaaatataacagggctggggatcaggtggtgagctgcttgctgagcatacacgaagccctgtgtgtgaggtccagcgccagtctgaaatcctagttctcagaggtgaggcaggagagtcccaagctcagggccagcatagctacacatggagactgtttcagcaagcaagcagaggtacagaatgtgtaaatatccagtactaaaaagaaagaaactatattaatagtctaaaagagtagccattacattataaataacaacactaaactaatacatttagcaatttaagaggaaagggacacatccccaaatcacctaagctgtagaaatggcacaaggttgtgttggagaaatgatggctcagcagtcaagtgcactggctgcgcttccagaggaccctggttcaattcccagcaaccacatggtggctcacaaccatctgtaccaagatctgacctcttctgtggtgtctgaagacagctacagtgtgcatattataatagtaaataaatctttttttaaaaagtaaatttcccttagtgaggctggaaatgtagctcagttgataaaacacttgcctacatgtatgaagcccaggtttacatccagttcccagaatggtaaatgattgagtacggtgcatacatgtgatcccagcacctgggagtgggagcgatgtggaagcaggaggatgaaaggctcaaggtcctcctcagaaacacagcaagttctcagcctgcctgagcaacctagtgagatcctgctgtgtgtgtgtgtgtgtgtgtgtgtgtgtgtgtgtgtgtgagagagagagagagagagagagagagagagagagagagagagagagagagaaagcccagggtgtagctcagcagtacaacccttgcctagcacatactacaccctaagccactccccaggactgaaaaaaacctgcaaaggaatgcatggcccatggtgatggaaatcaaacagttgttggctcagagatagagaaattgtctggaagaaagataagagaatttctggactcatggaaatgttctgtatcctcattggggtattggtcaccctagtgaatcgtgagatatttgaaacttcatttttttttcagcaaacattgtttatatactactatgagtcccctgctataatagttattagggacataaaaatagagaaacgcaagtatctgagcctgtaggggacatcaaagcagagtgggcacaaatgctctgaagcaagtagagtgcatctgctgagttagagaagggaccataaaccttcacaaaaggcagaaggactttggggtcaagagagctcattgtctgatataggtatagacgtgtgtgtctgatgtaagtgtagacgtgtgtctgatgatgtgtttgagagcctcaagcagctggctgtggaagcagtgatgggggatgttgtaaggtgggacgaaagaggctgggctgatcgtcactaggggactgctgaagccttttagatgggagggcatcagctctctttcaggattttacaagagaatatttgtcagttaagaaaaagtactagccgggcgtggtggcacacgcctttaatcccagcacttgggaggcagaggcaggaggatttctgagttcgaggccagcctggtctacagagtgaattccaggacagtcagggctatatagagaaaccctgtctcaaaaaaacaaaagaaaaaaaaaagtactaaagttgaaattataggcaaaactaaattagaaaggggttgtaaaataaaacagcttgtttttaatatttattcattataacattgtgattatggtttttatatctgtctattccctttcttcctctaaaattaacactaggaatccggaaaccttttggaccaccacaggcatgtttccccaggagttcattatttgttttcacaaacacgtaaagattgaaaagcttgtgatacaaagttacttgggtaagcaaatcacacattaattttttattctcctttaatttttccgtaggcagaggacacatgtacacttttggcaggagactagtttttccttacagcatgggatccagttttattacagaaatgggagggtggcgagtctgcgctaactgccttcagcacaattagtcctcttaagttgcaaacccttccaaagcacatcataatttccatgcagcttgctgtgtgaacgtctttggcagaagactatgagtaatgcaagaagctggcttgcccaaatactgagttctatgacatcctcatcctaggttcatttagcctgtagttctcagagtcttgctgtaaatctgataaccccagttattctcattagatagttttgatccttccattgctagtgacatttcctggagattacaagtggaatctcctcttggaacataaagccctgtctgtgataaagtatatcagagtcatggcaggaaacagaatagatcccagatgtttcaagtgaagagactttattaacaaatctacttataaaatcctggcctgggctgcaagaatgaataagcgataattgggtctcagaagccagctacagcagggagccatggctgtcctaagacaaggaaaggaaagtgttaccagagccctgggggtggggactgggggcttggggagggggtagatgtacagtgaggcctggcctgcagggctacatacagtcttgaagggaaaggaccatcaaagacatggcacgaagcaggacagagtgtagataaaagattctggtctcacttctctgtcctgggatcttctggtgcctgccttcccctggccatccccaaaaaaaagtgagttggtaaattagtctaggagatataatttgtaggagtcggctcctccagactaggacagaaaagagaaggatagttctggaggtcatgtggggacaagggaaaaaacgctgtgcagcaggaagatgcatgcgtggtatgcttctgtcattcattaccaaggccctagacagcgcccgtgtgtaaactcttgttctggcatttactggctctagtttactggacaccattcctgtcagaaaagcctgtgtcctcatcaggaaagtagcttaataatacctttctcataaaggcttcagccaggaatatgaacaaatatgcctgactcatagcatgttctccataaagaccatggttactagtagtatcacagccagtatgtaaatactccagatcatagccagattcagaaaagcactactagatgtgtgctgtgtagtgataaatactaacaaggctaccattatacagtgttatgctttactgtaggatttgtgggaaaacagtcatagctttcaggattcctggtgccagtacttggtgttgtcagtccgggcagcagagaaaagaagttcagacacaacaacatagaattaaatcgctaattaacatttgtgtttactctgtttatttacaatgctagtgcggactttgaggattgaaaagaccacatctaaagagccattggattttgagcagtgggttgaaaaaggtgtgtattcatttctccagtactgttctgagcacgagggagtggataaatgcctggtctctgcctttgtgctagcagttcaactgcattttggtaaataaaaggtgactctaatgagtctttagcacacataacgcctagaaaaacacacatttgtgcagttaccgtcacaagctgcttatgtaacattttcaaaattttaggatcattcttatcaaaaatagagatgatacatttaaggcttttgtgagctagtggcttatatatgacaagcaaacaaatattagctttatacctttccttccagattaatgatagtgtttaagaattaactagctgggcatggtggcgcacgcctttgatcccagcacttgggaggcagagacaggctgatttctgagttcgaggccagcctggtctacaaagtgagtttcagcacagccaagactatacagagaaaccctgtctcgaaaaaaaaaaaaaaaaaaaaaaaagaactgagctgggtatggtggcacatgtccttagtcccagaattcagaagacagaagcagggggaatctcttgagtttgaggccagcttgatctacatagattattctaggcttgctgtcactacatagtgagtctctgtttttttttttttgtttgtttgtttgttatttaatcaatctttttataaataacccactgtcctccagttaagcacacacataattagttcatgtgtctatctccttttcttagcaagtcctgtgaaaacaggagaaaaataaaaaggcataaaactataaggagaaaaaaatatataaacctagtgaatcagacaaatgtagatgaataagttttatgccagagggacgtcctgagcttccagaacacagcagattaggttgaaacctagtgccttccaaggagaatagcaagaagtaagctaacttatttcatgcaactccagaaaggcctagaatctgagagcagcaggcgacgtggagtatgaataaggtgtggatgactgctttataataccttatttaagcacactgttcatgaagttagatcagaaagtgggtactgatttcagaaacttagatttctacttaccgtgacacaaactaaaatgacaaaatgtaactaatagaatacagccatattataattccaagaaaagcaacctaaatttaaattttaatgtgtatgaatgttttgtctgtatgtctatgaatctatgcaccacattcatgcccagggcctacagaggtaagcatcagatcccctggaactgaagttacagataattgtgaagtgctatatgggttctaggaactgaacccaggttctctagcaaagcagtcagtgctcttcactactgagccatctctgcagtccctcactcccaacctccactactgcttttttttttttttttacagtatagaatagagtttatttagggcatggggaggggagttaagagggtagtagacgcagagaaaggcagtgagaaggagagagtagagaagtagaggctgtccatgaatatgtggagagagggggaaggtaatggggagagggggagcaaggggacaagaggcaagagagcaagagtaagagccactattgctttttatacaggtttgtattctgtatgtagcctaggctggcctagaacttagaatcaatctttctgcctcagtctcctgagtgctgggatttgggtgtgtacaccatagcagccaggaaatggagaacatggctgaaggaggcatgggaaagcagggtaatagtactgtctaaggaaagcgtcagcaagcagggaagtgctccagagtctcacttcctaaagacttcctcttttgggtagctttagaaattctgtgcattatttgatataaattcatatcaaaaggtactatattaactaaataattcatgtttctgaaggaatacttaaagtaattcatggctaaataagctaatctgttatgcaaataccattatgcaaatagtaaacttgggtacaagaagatagcatgtcacaggccattttacatcacggtgaaatttccatgtaggaaaaatggcttcttatataaaagtcttttaggagcttgattaataaaagggaggagcttgggggctggagagatagctcaatggcttagagcaccggacgctcttcaaaaagtccagagttcaattcccagtaagcacaaggtaacttacagtcatctctaatgagatgtgatgtcctcttctggtgtgcaggtataaatgcagacagagcacttgtgtacatacaataaagaaagaaatcatttttaaaaatggaggactttctgcattttatcaatttcttacttttttctttagtataatttctttagtaatatttctttgtataatttacatttgcattgtcttatttataatcactagaaatattttatagctcattttaaaaacctttaaggcaaatgtcttatcaaattccaacccccaaataatgataattcacttaaatctagacttaacaatagtttgccaaataattacatttttctgagcacaaatttccatggctttcttcatatatttgagcattaacctatttctattacatttatgctttagatttagtacacacagaggggcagcttcaaaatgaagaaattgtggtaagtgtatatactttatagagataagattatctctagtgagcctaattaagattttaaagtttcccagtatgaattattcatgaatagcctcatggtattagcagttctttgcctattcaaccattaaagattattctcaataatattataagcaatatgtattattaattaggctctttgaaaaaaaactaatcctggagaaagtggctacatggataaaccagaagtgaatgcttttgtttgttttattttgctcagtgatttgttttaagtatctggttacgttgttttatttgactctgtaggccggttagaataggacacagggctgagctgtcagagttggatggtaattaagcgtgaaaggacaagagaggcttagataaggggaattagagcataggatcagctacaaaccggagagctggagtggaaagaaaccaggggtttctgacagcgttccactgggctctgcttgtcaagcggactgaatgcccacggacagggaagctgctgcttcatcaggagtcggtctctgccagtttgccatgccctagttttagacaagtaaaattctccaagtgtctttagctgccagtgttggtatacagctcttctccatgacagtttgtggctttgcaccttccaggagctgttgtgaaatcagcatttcaaagactcctcagagggaggggagaactcagtccacttgtagtacaagtgttaagacttgagttccctcttcatcacacacgtgtaaacccagtgctgggaggcaaggtctttggggcttgctggtatacacacacccacagacacagacacacagacacacagacacacacacacacacacacacatactagaaactccattagaaatgtttgaatcccacaattcacttttctcccactaaatttcctccagtggggagcccagtagggtttccccccaaaaaaaattatactgaattgcttctgcattctttgatattgtgttgaggattcgatagggagagtgatacaacatttggaaagtagtaaggccaaataggaggcgggaagctcctcagacatttattactgatcgttgaccgcctccatttgttcttctagctgctgaccatagagctcaggtagcacaacagaaatgtgtagaaagctttgtatcctcttctaaacttcatattatatcccgagatttataattatgttttaaggtactgcttacctatttacacatatttaagctaatgtatgttctctgtcatcacaagcagtgacagtggacattaattagcacattctatgcacattatgaccttcaccttcttcattattctctaggaataaatttcatgggatggaattactcaggacaagagcataagcatgttatggctttttatgtctattgccaaattactttccaggaaaattatataaatgtgagaaaatattatataaatatttttagggtagtatattccaaggcattattaactgatggaaactgtttagcgtgaacagttctttacagagacaccaagagtgacagataccatgttgaatcactctcagattcactgcaatgatgctggctggcctctgaacactcttgccttatatcttgtaacatgctagaaaaatgacttttcatcaaagcctttgttttgccaaatgcttgttaatagtttgctaggattgctaaaaacatccatattgattcttttttttttttttcttttacaggcacgagatggctacgccactttcttgagattcattattgtctcagcatttgatcattttgcatctgtgcacagcatttctgcagagggactaacagtctcaagtcttccttagtaattacaacaaaatgctctgaactacttttaaaatatatttattgaaatacaaagctatctttgatatgtttactattaaatagatttgtatcactctgattccattttttttatataaaggaagaatgtgtttatttctcctttacctactcaacgtatatattacctgatatagtggcattatagcgtgaggtgaccttgggcgttgcaaagcattaagccatgaaactgtccacactgttaagtttgtttctaggcttttacagcacacaatcagaatggagtagcgtcacttgagctctgctttggggtctgggtgggagtaggtgaagcacctaccatcctcaggtatgagatgccggggtttctgatctatgtttcctggcaaggtctgctgccccacaggaactcttaacagaacaaagacaacttcccctgaacaaggagagactgaaactgcagctgtggctctcccattgctcttccttttgcaagccttctcacttcgtagcaggtttggacttgatagtttctgtgaactaagtgaagtataagctagctcctgcttagttccaaaccagcccaaaatgtcctggcggaagcaacagcttcacttcccaatcctggagcattgctcttggcttattcctgattgactgatttctctggtcagctggcatcttagtctcggtaacaaaggtttgttggacctaggtggcctcaagcagggatagttctcagagccaggaagagccttcagtggtctaccctgagcctctttgttattctgaagagaaccgagagggagaaaagcccaagtgcaagcatgtttacagtctgccctgatttccaggtcatggcacatagggaaggccagtgtcacaatacaagtctacccaagagcaagagcataagaggtgtgggagtgggggctgttgatgctacagtccttagtttcccctgctgtggcactgtgtgacgcacagagaagcctgtgagataacgctggccaaaactactgagcttgaatctaaccgagctccagagttaacttctgtcttcagttaattctcaaggtgggtgaacaaaacgacaccaagggaataaatagatgaggggctgaagtgttcctatccctgacttcactgctggtgctctggcactcttcagggccgcctttgggtagtaccatgtgatcagttctggccaatgagatgaagagtaagatacttagaggctaagcattaaattgccttggtgagacccttcaaggctcttctctgctgctcaaatggccagcaatggtctgtagcaaattcagtctgggtttggaagtgaggccgatcaatggcttacagatggtcttcatctgagttgtcttcacagggatggaaaagcttcactctgttgtgcctgggagcgtctggggctgcgtgtccttacagtctgaccttgctggtcccaagccatacacaagtgacctggaaagtcacaagtgtcagtgttgtggaaaatgttaaggaagggtctccactttagtttcagagacagagcttctacaaacacatgccctgtgtggatcttacctggaggcagcttgaacaaaccaactgagaaaatacatcttaaagataatctgggacatttgcttgtgggctgagtattgttcttctttctagatatactggatgtagcttatggtgttttgttttgttttgttttgctttgttttgttttgtttttaaaaaaaaaaaaaaaaaaaaagcctgttgaagcatggtggcgcatgcctttagtcccagcactcgggaggcagaggcaggcagatttctgagttcgaggccagcctggtctacaaagtgagttccaggacagccagggctatacagagaaaccctgtctacaaaaacaaaacaaaacaaaagcctgttgatccaggaatggtggtatatgcctttaatcctagcattctggaggcagaggcaggtagttctgtgagtttgaggccagcctggtctacagagtgagttccaggacagtcacagctatgtagagagagcctgcctctaaacatagaaaataaaaagtaaattaaaaagaaaaactgcccaggtttttccatgatatacatgaaactctacaagggtaaaaataaagtagtagctaggatttaattttaaacacggaagcagagatactcattaatttgtagcctgagcatgccaggcaaatgctttactattgagctacaccccagcccaattagagatttttaataatttttttttctggttaattgaagcagatgtttctatgatattgaatatgggcagtagatatatgggagttcaatatattagccttttatatattcttaagattgttcaggatggctgggtgtggtggcgcacacctttagtcccagcacttgggaggcagaggcaggcggatttccaagttcaaggccagcctggtctacaaagtgagttccaagacagacagagaaaccctatcttggaaaaaaaaatttcaggatgaaagagcaaaaataataataccccagaaaactatttattgattgatttgtttgtttgtctgtttgtttttcacagattatctattgaaggaaagtgagagtagggtgggttcctggggacatcttggaaaaccccttgtgcttatgttttgtatgtccttcagatagcttcctcagatgagattcccagaaggaattagatccaagccggaataccacctgactgactgatttgtttgcaagaatgaggaataacaaccagggctccacactgttaggcagaatggctcttgcactgagctccagcctcagcccagggttttaagaccttaggattcatgataaattgctcacaagaatctgtgacaccaatttactcctggaaagtaaagtttggggggctgaggggggacaaaggaagtcagaaaggaatatgaggagattgtcatcgaagatgggatggtgaatactcgcgcagagatcacacccgggaaggatgaataggaaagtccagaggagcaaagggccagctggccctcacacctgtgcagctctcaagtgttgtcctgtaacatggcaccgttactgtttttgagaatgtgacctagagcaatcgctttcatgttcaatagcatgaatgctgaagattttttctttgccaagtttttaaactgaaatgtcaataactgtttgcacaggaaactcggtgttaaggctcacagatcgctggaagggggtctctggagtttatctgatccatctctggcacaggccttgtgaattctcttgaagcagcttctgagcattcagataacaggggtcactgatggtcttgtgatactgcttcctataggactggaaggtgactcagggtggggctcagcggtagagcgtgtgcctagcagctcaaggccctgggttgcattcccagaaacaaaagcagacgactaacagagacagacaccgtgctcactctgcagactcactctgcagaccaggctggcctcgaactcagaaatccgcctgtctctgcctcccaagtgctgggattaaaggcgtgcgccaccactgcctggcgccaagtttttaatatagttagttaactgtatagacattaaaaaaaaaatccaacttggtagttgcctttattgatgtgtccccctacttttccccacaatttcaatttcttccgtctaccccaacagaagaagctattaaaagtgagggattaaaaacaaaaaacaaaaagtgagggattgttggggttctgagccccttgggctgttagaaaaggtatggaaactaaaacagtcattggatgtgacatgaagaagtgtagcaggaatggggaccgaacaagaggaaagaaagaaacacaggaaacctgtctcccccattcccctcctgctaaggggccaaggacataacctcgaacattaagggcagaccccgaagaagggaaatatgtgggggtcaaggaagggactcccctctctttatagaatgaaatgtaggcactatgtaggagtaagtcttcctggtgctcctggtatagctaatccatcatggctctggtgttgttgacagagagaaagcaagcaacatgcagataaaattgcctctggatcgaaaagtagaatcagccgactaactgcaagatgagaaggcatcagctcaaccacccaggtttcgggaactttctactgtccaagggctgctcccagggtttctttcgaatttctgtgccctgagagaggctcctctccagctgatgagcttctgtatgcaaacttcattttctccagaacgaggtgagaccaagctgacctgcaggaacccaggagactggagtactgggtcaggggccagaggtggcttccactcagccaatatattcattttggattactttttgcgagccaatgtctatcacaagttagccatacaactaaacaaccatgcagtagtcatgtaaagcaatagatgcaccaggcaggtggcttactcctgtaatcagagggctctggaggcttgaggtacaaagattgcttcgttccaggctagcctgagctatagtgtgcacccctctcagcgggaaggagagaggaagagggagagagaatatactaaggttctttttaagtcacagtaaagaattatttcagaaatggaagtcattttgtctgtctctcctttatacacactttttctaaagcaataaagatgtggatcctgtttcaggaatgcccctttgttggtacgctagctagttgatgtcaacttgacaccaactaaagggaacctcaattgagaaaatgcccccccagactgctggtgcattttctttgcttggtaattgatgttggaaaggcccatctcaatgtggttggtgccacccatggtctgatggtcttgggtgctgtaagtgaacagagtaagcaagccatgaagaacaagccagtaagtagcactcctccatggtctctgctcgggttcctgcctccaggttcctaccctgaattcccatcttagcttccctcagtgatggacttataaactgtaaagtgaaacaaaccctttccttcccaacttgtcttggtcatggtgttttatcacagcagtagaaaccctaagacagtgggcttcatcttccaagtaaggaccccacagtcctttgtaactcgagcctgatagtgagccttccaaaatctagagctatggtagtatgcatcaaagtcttaaacatacacacagcctttaacattctccatttgtaaagatatgtttgaatgaaataggtaagggatggctacacaaagataaaggttttcagcaatgctgtttgtaagttaggaaagctgcatctactaaaacaaatgatgtggggttggagagagagagagagagatgctcaaggacacacctgtgcatgcagacatggtctcaaaacaaaaaacaaaacaaaacaaaaaaacaaacaacaaaaaaagaatgccatcaaagaaatagttatagttgttgacctcaaacgggaatgcatacctgttactgactaaaaactaccagggctttggtgaaggaggaagctaagagctgacttgtaacctcccagggctagagacttatgtcccagttataaaaagcttacgcaggacaggtgtggtggcgcacacctttaacccnnnnnnnnnnnnnnnnnnnnnnnnnnnnnnnnnnnnnnnnnnnnnnnnnnnnnnnnnnnnnnnnnnnnnnnnnnnnnnnnnnnnnnnnnnnnnnnnnnnnnnnnnnnnnnnnnnnnnnnnnnnnnnnnnnnnnnnnnnnnnaggcagcaatcccttgagttctgccagtggtttgcagaacatggagaatgaccacatacaagttggcttggataacacagaagggcaggaatagggaaccaaaactgaaaccaggaaagacacatcaaagagacttctgggtatgaagtagagcaccagcctgtgaatgactcagtgggtggaggtggttgttgctaagcctggctagctggcttagggtaggttctttaaggaaagttggctatttgggggatgggggggggtgtttgttttgagacagggttttgtgtaacccaggatggcctcaaactcttgattctcctgcttccctgaggtttgagattacaagcttgcatttcactatgtccagctgacggatgcttgtcagggtgatttataggcggttctctcaggagaagtctctagggaaatgtgatggtttgtatattctggggccagggagtggcaccatttggaggtgtgacctggttggagtagctgtgcctctgtgggtatgggcttaagatcctcaccctagttgcctaggagacagtcttccactagcagcctttggatgaagatgtagaactcttagctctgcctgtgccatgacagcctggatgctgccatgctcccaccttgatgataatggactgaacctctgaacctgtaagctagccccaattaaatgtttttttttaataagacttgccttggtcatggtgtctgttcacagcagtaaaaccctaactaagacaaggagcagcagagagcaacgacaaaggctaactcaagatagctgtacccaaagtctccccttatcccaatctcccagctagccttggagtatgagaggtgccagggtatgctggtcaccttcaacaagggaccagcgtttgcacacttccagctcacactcggatggaggacagtcccttaggtgttctggtaagaaggctcttgtcagttgagggcagttctcaggaacaggggtgcctgtgagccctcagcagccagcactcactgcagctgctacgagtcactagcatagacatggcgtctgggcagagcaccagcaatatccattgaggcggcgcatctgcaagggtggtcctggaacatcagtgctgggttcatctctggaaacttgttggagaagcaggttcctcatctcatcccaagcctactggaccccaaactctgcaagcaagactcaagcatctgcgtcttaccgagcctgccaggcagcttcaacgcatgcgcaaatgagagaaccgctgtgcgatgggggcagatgactggaaactataaaacaagtaaagtcccgggataatcaaggagatgcagaacatatttttcaagagaaactacacacagaattcccagatgcaagtgatcctctggtagggtagctgggactgtaggtaggctcctgccaattcctgtgactcctgcattccaggaatatttgctataggacaatccacactggagtaggctttggtcgagttgctggacttcaagtataaagggatcaatggctttcctggtagaataaattattcaagtgccaggagaagtatgttaggttgacctgagttgcctcccccataacttagctgccagaagatcatctaacaatgtccataaatctcaggtagagattggagcgtgaggtgccttagctcactcaccgtgctttcagcttaaaggcgacagctgggttttatgaacacatgaggcttcagggcacagggtcctgtggcctctttggcaagctactggtagcttcagtgagttaaactgctggggattctaatcctggagtcttttctctgtcaatcagctaatgacacttgataaaatacacacatacatggggaaggggaaataatctgttcttgtgtcattagcccaggctaccctaaaatacactatatacagcctaggcaggtcttgacttgtaatcttcccatcttggccccctcggtgttgggattacaagagtgtgctacaatttctagactggatatactattttaattgtctctgtcctgtcagaatgaggttcaggctcagagtccttacatatggccaagtactacacagggcaccaccctcatgaacaaggaaactatgatgtgggagtcctcccttcaaatgcagacacagggacaataggtgtagcccaatgagagaacacttgtccagcatgcaggaggtctggacttgatcccattaaacaaacagaactaacgaatgggaagaagtgcatacatagtaatgtgtcagagcacaatccaagaacgcagtcatatgagaattctgagtgcttgtgagaagatgccaagaaaacaagacaaaagtcttgtgacctcagtttcttagtttttgccacctgtggcttgtccttgtgattgaaaacctcaccggtgtgattcctcccaaccctcagggtctaaattggcgctctgaaaaaagttggctattgcatgagactgtagtccatctcagtgttaggcccttctctcccagatgcacactgctaactagagccataaacagtagtgaatttgctccttcacgtcagttgatgttgagagcgaactacttctaaataagtcattagtaccaaccaatgtctttcacctaccagtaactcataatattaggcaagaaggagtttattcttggaatctacacctagagtgctctccctctctctttctctctccatcatcaattagatttaagcttctctctgcaatgtagttctgtctatctggtttattctcttgttgtaataaacactatgcaacttggagaagaacaagtttaccccatcttacagttccaggttataatccattactgaggacagtcatagcaggaaccccagacaggaaccaggaatcagggaccctggatgannnnnnnnnnnnnnnnnnnnnnnnnnnnnnnnnnnnnnnnnnnnnnnnnnnnnnnnnnnnnnnnnnnnnnnnnnnnnnnnnnnnnnnnnnnnnnnnnnnnnnnnnnnnnnnnnnnnnnnnnnnnnnnnnnnnnnnnnnnnnnnnnnnnnnnnnnnnnnnnnnnnnnnnnnnnnnnnnnnnnnnnnnnnnnnnnnnnnnnnnnnnnnnnnnnnnnnnnnnnnnnnnnnnnnnnnnnnnnnnnnnnnnnnnnnnnnnnnnnnnnnnnnnnnnnnnnnnnnnnnnnnnnnnnnnnnnnnnnnnnnnnnnnnnnnnnnnnnnnnnnnnnnnnnnnnnnnnnnnnnnnnnnnnnnnnnnnnnnnnnnnnnnnnnnnnnnnnnnnnnnnnnnnnnnnnnnnnnnnnnnnnnnnnnnnnnnnnnnnnnnnnnnnnnnnnnnnnnnnnnnnnnnnnnnnnnnnnnnnnnnnnnnnnnnnnnnnnnnnnnnnnnnnnnnnnnnnnnnnnnnnnnnnnnnnnnnnnnnnnnnnnnnnnnnnnnnnnnnnnnnnnnnnnnnnnnnnnnnnnnnnnnnnnnnnnnnnnnnnnnnnnnnnnnnnnnnnnnnnnnnnnnnnnnnnnnnnnnnnnnnnnnnnnnnnnnnnnnnnnnnnnnnnnnnnnnnnnnnnnnnnnnnnnnnnnnnnnnnnnnnnnnnnnnnnnnnnnnnnnnnnnnnnnnnnnnnnnnnnnnnnnnnnnnnnnnnnnnnnnnnnnnnnnnnnnnnnnnnnnnnnnnnnnnnnnnnnnnnnnnnnnnnnnnnnnnnnnnnnnnnnnnnnnnnnnnnnnnnnnnnnnnnnnnnnnnnnnnnnnnnnnnnnnnnnnnnnnnnnnnnnnnnnnnnnnnnnnnnnnnnnnnnnnnnnnnnnnnnnnnnnnnnnnnnnnnnnnnnnnnnnnnnnnnnnnnnnnnnnnnnnnnnnnnnnnnnnnnnnnnnnnnnnnnnnnnnnnnnnnnnnnnnnnnnnnnnnnnnnnnnnnnnnnnnnnnnnnnnnnnnnnnnnnnnnnnnnnnnnnnnnnnnnnnnnnnnnnnnnnnnnnnnnnnnnnnnnnnnnnnnnnnnnnnnnnnnnnnnnnnnnnnnnnnnnnnnnnnnnnnnnnnnnnnnnnnnnnnnnnnnnnnnnnnnnnnnnnnnnnnnnnnnnnnnnnnnnnnnnnnnnnnnnnnnnnnnnnnnnnnnnnnnnnnnnnnnnnnnnnnnnnnnnnnnnnnnnnnnnnnnnnnnnnnnnnnnnnnnnnnnnnnnnnnnnnnnnnnnnnnnnnnnnnnnnnnnnnnnnnnnn

SEQ ID NO: 885 - DNA, 610 bp, Mus musculus
ggcgtgacgggcggggatcgcgagcggacccggtcctttcgcggagctacccaaggcccaggcgagcgggctaaccattttgaaatgaggaaagtggatctctgctcagtcactgaagggacagaagtgattctggccacatcgagtgatgaaaagcacccacctgaaaacatcattgatgggaatccggaaaccttttggaccaccacaggcatgtttccccaggagttcattatttgttttcacaaacacgtaaagattgaaaagcttgtgatacaaagttacttggtgcggactttgaggattgaaaagaccacatctaaagagccattggattttgagcagtgggttgaaaaagatttagtacacacagaggggcagcttcaaaatgaagaaattgtggcacgagatggctacgccactttcttgagattcattattgtctcagcatttgatcattttgcatctgtgcacagcatttctgcagagggactaacagtctcaagtcttccttagtaattacaacaaaatgctctgaactacttttaaaatatatttattgaaatacaaagctatctttgatatgtttactattaaatagatttgtatc

SEQ ID NO: 886 - protein, 171 aa, Mus musculus
GVTGGDRERTRSFRGATQGPGERANHFEMRKVDLCSVTEGTEVILATSSDEKHPPENIIDGNPETFWTTTGMFPQEFIICFHKHVKIEKLVIQSYLVRTLRIEKTTSKEPLDFEQWVEKDLVHTEGQLQNEEIVARDGYATFLRFIIVSAFDHFASVHSISAEGLTVSSLP

SEQ ID NO: 887 - DNA, 44920 bp, Homo sapiens
ggctacaaaattcttttcaggatgattaagaaaaagagaaacaatattttaaaattccatggcatcttgcaagacctcatgaaatagtagctattactattatgtcaacaacaaaaagtgatattttaaggaaaacatacttgcctccctgttaccaccagtgggattaaaaatcactggggtttcaacacaagggagaagagagttttcgtaaggttggaattcagttgcaaagacacttgcttctggcaggtagctttgtgacttaaccccaagatagcaagtgcctgcacctacccagttattttattttcatttattttttcaagctcattacttttgacctgaacccctttgtgctgacaaaacctcttggactgcagctacagccctggattgcaaatgcaacctcaagtttcctgccctctatttgcctttaaggattcaaaaggagaagagaggtttttgataacaactgaaagtcttacatttgaatgagacagtcaagtgtggaattgctgcaataaaatatgggctaaaagattatgttggccgggcgcggtggctcacgcctgtaatcccagcactttgggaggccgaggcgggtggatcacaaggtcaggagatcgagaccatcctggctaacatggtgaaaccccatctctactaaaaatacaaaaaatcagccgggcgtggtggcgggcacctgtagtcccagctactcgggaggctgaggcaggagaattgcgtgaacccgggaggtggagcttgcagtgagctgagatcgagccactgcactccagcctgggtgacagagcgagactccgtctcaaaaaaaaaaaaaaaaaagattatgttaaaattgtttcctatattttctggctgggcatggtcgctcacgcttgtaatcccagcactttggaaggctgaggtgggtggatcacttgaggtcagcagttcgaaaccagcctggtcaacatggtgaaaccctatctctaccaaaaaatacaaaaattagctgggcacggtggcgggcgcctgtagtcctggctactcgggaggctgaggtgggagaatcacctgaacctgggaggcggaggctgcagtgagccaagatcacgccactgcactcaagcctgagcaacagagtgaaaccttgtctcagaaagaaaaaaaaagtttcctatattttctgattattatataaatgtaaatgtttcttacattttctgataatgtatcactttcattggaaaaaaattaagaaaatataggaaagtataaagaatataaaatcaattccaatcccaccatctagaccgctttttggtagatttcttttttccttctatctgtccaatacatacatttaaaaaatctgtttcttaaaatattatcttaatagttacataatatttcatcatataaatatactataatttgcttaaccaactccctactgttgaacatttagtttttagattttcacttgtacaaacagtactacaatgaacactcttatgtaaaaatatctgttcccatctttgattattacattagggatcagaatagattcttagtaagtagaattaatgggtcaaacaaatagtatggatgttttcaaggttcttgatacatattgctaaactgcttccagaaatgctacactaatttatgtcctcatcaaatgtgaatgaaaagtgctattctcatcccaatctgaccaatctaccactacaacagtatccagacatcgcaaatggataaacggcgttttcaacagcatggcaaatattaagctataagggtaggtgggggaaaaaacagaatacgagttgtacaaagtatatattcccaaatgtataaaaataatatatttgaaaatgatcatcatggtgggattatggattttttaatactacaattttatgcattccccaaatagcatgtattgctaattttaaaacaagatatacatcataagtctattttgccattgttctaacttttctacaatgaacataaacaacttggaagaaaaaatgaagggtaaaacgtattttaaatgcataagccacaatgaaatattgcttgactttttcatttaggcaaggtaatttttttcctttccactggcagcagtcccaagtccagccatgactgagaccatagcccagagacagagctttcaaggtgcctgctcagtttatgagccaagtttctattcttttctgcatgtgtttatgtcttttctttttaaaatacagtatttggcctgtggtgaaaccattaattctatgagctgattaaataaagatcatttctcctttattaagcatacgagcttacctcctgttttctgatatggctttctcttatatacattttttgttcagcccttgttataatgctcatgcagattgtgcgtcttaatagtaagctgccggctgggcatgggggctcatgcctgtaatcccagcactttgggaggctgaggccggtggatcacctgaggtcaggagttcgagataagcctggccaacgtggtgaaaccccgtatctactaaaaagacacaaaattagccaggcatggtggtgggcacctgtaatcccagctacttaggtggctgagtcaggagaattgcctgaacctgggaggtggaggttgcagtgagctgagatcgcgccattgcactccagcctgggaaacgaggaaaattccgtctcaaaaaaaaaaaaagtaagctacctttcaggtctaatcacagaatagttcatacagtggtatacaataaagctattttaaaaacctacaagtaggccaggcgtggtggctcacgcctgtaatcccagcactttaggaggctgaggcgggaggatcatgaggtcaggagatcgacaccatcctggccaacatggtgaaatcccgtctctactaaaaatacaaaaattagctgggcatggtggcatatgcctgtaatcccagctactcgggaggctgaggcaggcgaattgcttgaaccaggcagttggaggttgcagtgagagctgagatcgtgccactgccactccagcctggcgacagagcaagactctgtctcaaaaaaaacaaaaaaaaatctacaagtattgatgataaatgattttcaaattatgtgaagaaagcaaggtccataagagtgtatgcagcatgctgccatctgtataacaaagacgggaactacataagcatgtatgtgtatagaatatctctggaatggtattttaaaaactggtaacagcatttggtctctggagagaggaaactggagatgagataggaagaaggcttatgtttcattttatgccactttgtgtttgtgtttaaattgtttgccatgtatagttttattgtttttgcaagttttttaaaaaattagatgttttgaaagtgtttttacatgacggtaaagtaaaaattttaaataaagcatatgagcaaaggcagtcacaagagaaaatatctgctttgttaagaccacagaccttagtgttgggactttgagaactgccaaactttaggatatttgaaattttaatcacccaatcttttaaggtcactttttatctaatggtcagtatctagtggtctgaaaaccaaaaacaggcccaaaaactctgggtactaatctccccatctgtaagagcgtatcaagagatatttggcagatcacattttgtcttttctattttctctttgaaagctgttagaataatattttctacttaatggaggagctgtgacaactaatccttgtaaaatgatttcagaataaagttaagtgtcatctaagaggtgaggagaaggaagagtgatttttttcaatatggtcttttacttcatatttggaagttctaaactgaagtgctatttgatgagggaagcccctgagcccactaagccccagagcttgacagaattaacacacccaataaaataccgaataatctaatcagaacacccacctgtttcgcaaacacagggagcaaagcaccaaacttccataggcctcagtgaatttctgtaaagccctcagccctgcacctggctcagtgaatttctgtctggcttcagcagcagagaacagcttttcagcaatctgctcaggaaagccaataagggaatcaatgtgatccacattgtcggagatgaaacccaggacaaggctgaagagggatttggcggagtaccgaagattcccctctcgggtgtatgtgaagatgaaatgatcagtcttctctttccgtgcagtgtcgtcttccctgttcatgcaaagctccacagaaaagcctttggggaacagtctgaaaggccttggcttctgcaggctactcctgacaccatccagagccagattgaccatgtgcagctgcccattttctcgcatgtagatgggccctgggtccaggtggttttctgagctgaggtagtaagacattgccttggttgcaactgtaaaagcaaggcacagggaagcaaatccaattaaaatgccatttgtaacatgtaacttcatcttgctgtgcccagggctttatgagcctaccaggcaggcctggtggctggtttaggaaaagcaaaactcaccagttgcctgggaactttggcattcaaggttgcctctattgccgctacctggaatgccccttcctactcttccctttttcttgtttatctggccatctcccactcttctttcaaaacccaggtcaaggccggacgcattagctcacgcctgtaatctcagcactttgggaggccgaggcgggcggatcacctgaggtcaggagttcgagaccagcctggccaacatggtgaaaccccatctctactaaaaatacaaaaattagccgagcgtggtagtgcgtgcctgtagttccagctactcaggaggctgaggcaagagaatcgcttgaacccgggagacagaggttacagtgagccaagattgtttcattgcactccagcctgggtgacaagagcgagactccgtctcaaaaaaaaacaaacagaaacccaggtcaaaatctcatcttcaaaattcatgctaaggaagttgtcacagatgtcagcaaagattcatttatgtgtaaattaatggcagcaagtttatattagcaaaacaattggaaaacgacctaaatgtctaacaattgggatgttaataaatacattatgacttacacgtaccatggaatgtgataaagccattaaaattatgaatttttaaaaaacatgtttagacacagaaaaaagactagaaataaataactcccttgctagcttgacacattccacacacttcttggttgcactcggtgcactgttgtatttatttgtttctgagtctgccatctgctgctttgggctccttgagaaaaggaaccacgctgaattcatgcagactctataacacagtgtcctggcatcttatagtccccgagcagatagtgtggaaccaacatttactcgtttgctaaactttacaaagaccaaaagcaacaggattttttttatctacaaataaatacctccattacaagagctacataaaaactattctagcctttggaaacttcgtatctattaaagttctattagggcagttttaacataaaaaagtcaaacagttgggcatttctgcagtcatgtgggtaataatatatgcccaagaactaactggaatacttgttttcctcctgagtaaccatgagatttcaaaatacatgaaaaattgctatgttacataaaatgaaggtatttgaggattatttctacaatttaaagggagaagagaggtagaatatcatacatgcctgataatatccctaaaataatctgattgagttttagagtgaaccaactcagcttcttctgcatcaatgtggggccacaatgtggccctgaagccacttatgagtgtcagcacacaattaggtccgtgatcaaaaatgctgagtctctggagatgaaacaatgaacctgtgtgtgggaatcagtactatccatgtttctctcaaggataattatgtgtataaaagcacatgagagaagagtactctgcctagccctagagcctcaccctttcctgctcatctccttatgtcctactctttggccctgtcatactacccaggtaaactggccatgctctcatgtcccactggccattgctcgttctgttccctttggctggaacatccttctctgcctacctgacctagctaattcctactcatcattaacttcgtccctcttctgggaaaccttccctaacccctgcaccagtacgtgcctgtctggttttcccagagcacccagtctctcctacatagcacttaggaccatgtactatgtctgttcacttgttaatgtacccagagtggtgagctttttgaaggcaaggtacttatttgattcatctatctttctcaggcttgacatagtgcctagtactaagtaagccctcaaaagatatttgctgaactgtatgaaaggaagggtaagacctcaaaggacaaacttggtgctctcagttgtagggcctgctgatactgttgctaggagccagctccttttccaggcaacagctgcaggctcctcccccacttgccagacccttctgcaggtggcagaggcaaagcagacgatgggaatatattgctactggtactacaaggggtgggagacaactaaactaaaaaacaggggaaaaaaatcctgtcacagtgccagctcttataacccatacttttctcttgccagcatttacagcccctgctgctaaggagacacctcatttattctgagctgttcctccagtaggggtgagcatctggaccctccaaccttgcagaccttaattttgactgaggaattacggcagatgtcctttggtctttatccctgtcatttaacattcagagctccactctacttgtagatcagaaagcagacgctaggtatggccctaaaaaggactgacgtgattttaacaacagaaagacaaattctatggaacataccctattatagtggatgaatacactgtgaactccctgagcaatgacacagggtctgcccatctgtattgcccccaaccctcacccctaacagtgccttccacaaacactgttgtaaaatggacaaatggatggatggatggggtgggtgggtgaccacttcagatgaaaactagaagtctgattccatccagcagagggcacaagcagcttggggctagagtaaggaccctaacctgggctcctcaaaatcctggctgctttggcttccagggatcattttcaaaaaaaaggcacagttctggttgtttttttgtttgtttgtttttctttagattacccaccaaataccacttatctttctaaatgaggaaaaaataaatacaattttttcctggagagtaaacccacatcatttgtccagaagccactggaggaattgactttggtttgggaatcctggcgtcctttaatttctactactaaatcagcacatcctgcattctcccaaaaaggatcttcctgagtctatgaggtatgtaacatgacctaagcattaaattaacatttgaacccttcaaggctaagaaccagaaaggcaagagaattctacacaaaacttcactacttgggttcatttgtccctcactattgtactgggtggtgtattacaaatggacctggtcaggagacagggcctgttctaaaccatggtgaaaactccatccaaattgaaaaattaaaatacttagtcactacaacaataacaatgcccaatgtagatcgtagtagctgtattatatattggatcaagagtaacagcgacattttgatagtttcccagcctgctacaggaaggcagctttgtaacccatacgacagcatagaaaaatattacaatcatgtatgttctagcatttggtcaccacaagcgagccaaagttaccacgaagtgtaccatttcatcaaatgaatgaaacacagctgtattacattaaaaactcagttctatacagctttcttgaaaaaggccagacaaaattattgataactacacatgacagttttttagaccttgaatccagtttcccaagcaaaaagcatgactatgccagtcaggtggactgggattgtcagggagcccacagggtaaaattgtgagctgaatctacggctaatttgaagagaagaagaagaaaatatctaacttcagtagataaagtaagataaaaatcccctaagaataacaagttgtagcagtaactatgatgtttaatgatactggatgatggctaccatttattaagcacctaccagttgccaagcactgtgttaggtactatataaaatgatctcatgtaatctttaatgatcctatgaggtcagtattgccttttaatagacaaagagacccacggaaataaaataacttactctagaacagagctaataagtggcagagccagaattcaatctcagggccgcattactccaaagctcaagctctttccttggcatgatgctgtttctcaagactaaaaatatgacatcaaccttaaggataaaaaaaatgtgaaaaattaatctcacccacctgttcgatccctctagtattcactggatgaagcctggggggagggggtggggataagattaaaaaacaaaagcaaacaaaaaaacagtgcacatctggggaaagagctagtgggaacacagccaggacatttacaacgaggcctcccttcttccctcagccaggcccaaaatgagctacatccatataccaggagaacatctgccaacccatggccttcatcccaaggctgcagacacttttggtttatctgaaaatgcagtattcttgggaaaatttctaacataaaaacctaaacagaaactaaactatgggtagttctaaaccaccaataaccaacaatccaccttcattgttctgtgtgtccccattcttcaattttcaactttcctcactacttttttcctataatatgcactttcctacctgccttctcacccataccctttcaggctccctacttccctccaagaacatgccagtctctcccacaacgtgacactcttaccaattctagcgcttctcacaccaaaaatcctaaccccactcccttcgcccaccccagctctcctgcccctttcaaccttcagacccttccagcccttccgagcccctggtgaaaggtggcttgctgtcccacagacccaaccttccaacctccgatctcccaaccttcacctgcctccccttccttccccacactcctccaccccccactcctctccttcaccatctattcttcccttcttcccactctaggggcttccctctcctaggaccccaatctctccatccctttccttgccttctgttctcaatcttcaagaccctcttccttcacgcctcactatccccaacttggcattccacacccccaacttttcttccctgcccccaagaccccaccctctctattcctatcctatctcgtttcctccttgaacccctaaaatcccattcccttcccccttccttcttcccgctctctccccaagcatgcctctccccgagtccacccaggctaatcctgctccctgtcccacccaggccccgaaccccaattctcacacgtccccatagcctgcccccgcacccctacgccacccttaaacccatcgcccccaccagtatacctcatcctcccctcaacccgcgccccgccgtccctctggggcgtcccctcccccaccccgcccctccctaacaccccgcccccgctcccacacgcaacccggggccccgcgagcggcccggcccgcggccgccacctacctgtgcccctgcccggggcagcgagcggcagctcctcggtgacggctccctcctcccgcggcccggctgacggggaagggctcagcaccccgggcacaaagctaggaagggtgggacacagtgaaggtgggaggagggagggggctgggggcaaccaggcgccgtgggaccgcgggaccggcgggggcgggagcaaggctgggccggggaggcgcgcgtgcgcgggccccggcacgaaggcggggccggacctggaggcggggccaggcccagggcaggcgacccgagggccgagggtttggaactcgcagaggtgggccctgcgcgtgcgtgctcgcgggagggtgggtcccctgggtcctgcgggccccggggatagagctgagctgggggagggtaggcagcgcgcgccccgggactggcctggggaaaggcgcacaggagtggtttcgcatcttggcccgcgaagtaatgggagccggagagggcggggccgattgtgggcggggcctgtgggaggcgtggcgctaagagctaggggtaggaggggccgaggccgccgcgagggggcggggctgaggcggggtggggcctctgggaggcgtggcgcgaaaagctcggggtaggagcgagcgcgcccgggaactcggtggagcgagcgcgcccgggaactcggtggaggccgcggtggcggggtggggcggggctgagggcagggcggggcctgtgggagtcgtggcgcaaagagctcggggtaggagcgcgcgcccggaaactcagcggtggccgcggcgaaggggcggggctgagggtgggacggggcttgtgggaggcgtggcgcgaagatttcagagttggagcgcgcgcgaccccggactccacggaggccgcggcgagcaggcggagctgcgggtcgggacgctctgcgtggggcggggcgcaagggaggtttcgagcccggaaggtccggcgcccagagctaacgggagtcccaggtgagcgggtagcggggtaggcaggctggcaccagagggtatgggggcctggccgggcaaggcagaaggacggggatgttggtgggaagggagcaacagtggaggggtggtgaagagacgcgcggcgggaggcgtggaagggccgcggcgggaggtctgacgcgggcccgccttttcctctagaccctggaagcgccactaccagcccacgaaactctttgaggccagaaatagcgtcttgaccccccaaaagggaaaaccagttgtaaatcgaaattaattagtctaccaaaatgtaatgtaagctgtcagccgcaacgtaacacatctagctataaattgtacctaaggtcgggggcatttatatattctttacataatttggggcgggcctccacaagtctgaggctttagggccttgaactgaggaggagggtttgggatggaggtgagaaggtggtgccagggctggtttgccttggaagccgtggccctggcccctcggagacagaagccttaggccgggtccgtgttttctaaagtacaccacgttcccaatggatgatgcttgaagaaagagcgtgaggagtccagctgtagcaccagaaccaagggagctggtcagggagaaggtcctctaaggacttgacctgaagaggtttggggaaagaaggaccacaaagggcatgtgagctagcgatgaaagggtgaactggggacgaaaccagtggcactggtttagaagacaggataaggcatcagggaataccagggtcagggattgtaaaaaatggaaaggatagcaccccagagtgtaccacctttggtaaactgcggccctgaggaaattgccttgctctaaaggggtgggggattagactacctcccaaacctgcactttgttttgttttttggagacataatcgctcgtcgcccacgctggagtgcagtggcgcggtctcgcctcactgagcctccgcttcctgggttcaggagcttctcctgcctcagcctccggagtagctgggattacaggcacctgccaccacacccagctaatttttatatttttagtagagacgaggtttcaccatgttggtcaggctggtcttgaaccgctggcctcaagtgatccgcctgcctgggcctcccaaagtgctgggattacaggcgcctgccaccaggtccggctaatttttgaatttttagtagagagggttttggggtttcaccatgttgcccaggctggtcttgaacttgtgagctcaagctgttcgcccacctcggccttccaaagtgtcaggattacaggcgagtcaccaggcctggcattgtatggatttctctaaggttggttgcctcttctcattaactgcaacaaagaaccttaaagaaaaccaagtctctgccgtttctacttaagtaattctacccaaaacaggaaataggaagggtaatggtgaatatagaaggtgtgaaatgagttttgtattaaagcatgtgtttgcttctctcagaaaacttaagaatgtgaggtaagaaaagaactgaacatttggagagtacattctttcctattcatctgctccatatcaaccctaaagtgtaactctcttttaaaaaacaagttatccgccggacacagtgactagcttctgtaatcccagcactttaggtggccaaggcaggcggatcgcttgagctcacgagttagagaccagactgggcaacatggcaaaaccccatctctacaaaacaaaaaaattagccggccgtggtggtgcatgcctgtagtcccagctactaggaaggctgaggtgggaggatcgcttgagcccgggaggcagacgttgcagttagccgagatcgagtcattgcactccagcctgggccatagagcccagaccttgcctcaaaaaaaaaaagttctctccctacatctccaaccctcacatttccaccgccaaatagattactgcatagtttccccagctttacactatttatacttgggaccaataattacttgaggatgtgctgtcccgtatatgatggtatatttagcagcgttccctcccaagttgtgacagttaaaacttcagatgttttgaagtgtcccttggaggccaaaatctacacccagtccagttgagaaccactggagtacaggataaagttcattgccattaacctggcttttcagatctttcattatctattcccaatctacctttcctaaaatctgactcagcctaagagaactaccaatgcaggaatcctttctttggcttccttcgtagatttctttgccttcttccatagattatgatctcttaccgacttttcttggacgttttcagggatgaaagaaatttaaaatctttactttgaacgaaagtccttgtctctccaaagtcttcctgcttaaaatgtgcatttgttgagtccagttcacgccccaggaggtgtaaaaaaaaagaaatttaaatcctttttccatttgtgagcaccactgagagtaaaaattatagtcgcatttctatttttcacctttttctatgtaatatggtttatagatcatcatgaactttttactctcctccgaacaatatcacgcctgacaatgtcctacttaaaacgtagtacccagaactgaacacagtattctggatgtgcgtcacatgatgttagcacatagcatattgtactgttagtttcatgcttattcatcttccttgactctgagcttgaaggcaagaaccaagtcttagtcacttaggttgttttattcatctttgcactactagcacagtggttggccctttgttcaattggtgttcaaaaatgttgatggaatgtggtacttccttaactctaagatagcattccattacctttaggggcagatagagtacactgttaccttatattgactttgtggtcaaccaaacctatatgttttatcagatcagaggttggcaaacttttttgtaaagggccaaatagtaaatatttcaggttttatgggccttatggtctttcacagtgactcagctatgtcactgtaacatataatcagccataggcaatatataagtgaatgagcatagccactttccaatataattcatggacgttaaaatctgagtttcatgtaatttttgtgtgtcacagaatattttgatttttaaaaatattttaaaatgttaaacgcatttttagcttgtgggccatacaaaaacagatggcaggctagatatggctcacaggcagtagtttgctaacccctgatttagaccaacccttgtatgatggatttttttcaaaactgagtataggtttttacttttatccttattaaatatcttactcattgcaagtcgtctttctagcttgctcatttctttttgaatgctaattctgtcacctagcatatcagctgacatcccagctttgtgtctgcaaaattgataagcatactttgtgcatccttaattaataaaaatgttgagtaggataaggatagaagtcctccacaagttcattttcttccattaatcatcattctttgagtatagccactcagagttagaaatatctacctagagtactagctatcacccaattcatatttctctgtcgggtccacagggtatcttgagaagctttgtctgaagctttgttgaaatctttagaacatgttccagatgggtaggaattccatcagacaaaccgaaatatataggtttggtatagcttgtaaactaatgttactgctacttccaattttagtacttccttggttacattttcaaggttaccattttaataatgaaatttaataattttaggattttgtcgagaattagcattcaagtttatcaatctgtatttacagaattcaccatctttctcctcttaaaactaaggcttgacaatgttcatcccacactgactggttctctggtatcaatagtgtcgaaaactgtggtaagattggtagagaaaaaaggcacaaaaaattaaaatatatgtttttatttcttaccaatgttaccacacttttaatactatcaatactagtttttaaaatataatagaaagtgaactttatgctaataaacaaaaactaagaagaaatgcatttttataaaatattgatattggccgggcacagtggtgcatgcctttaatcccagcactttgaaaggctgaggcaggaggatcacttgaggccaggagttttaagactagcctgtgcaagccgggcgcggtggctcacacctgtaatcccagcactttgggaggctgaggtgggtggatcacaaggtcaggagtttgagaccagccaggccaacatggtgaaaccccgtctctactaaaaatacaaaaattagctgggcgtggtggctgttgcctgtaatcccagctattcaggaggctgaggcaggagaattgcttgaaaccggaaggcagaggttgcagtgagccaagatcgccccattgcactccagcctgggcaacaagactgagactccatctcaaaaaaaagatagcctgtgcagcatagcaagaccccatctctacagaaaaaaaaaaatttttttttggcctcccaaagttctgggattacatgcataagccaccacacctggcctctacagagaatttttttaaaaattagctgggcatagtggcatacctgtagtctcagctacttgggaggctaaggtgggaggatcacttgagccctggagttcagggctgcagtgagccatgattgctccactgcactccagccttggtgtcagagtgagaccctatttctaaaaaactaaaacataaaataatgaaaatttttaaaaattttaagaaaagtagggaaatttaccttgccagacattaagactttataccttattctgtcattttgcttttagtctgtatctttatatttagaatgtatctctggaaaacagtatttagttgtttttttaatttaataattgaatgtttattaacactcaatggaataattgatgtatttttgcttaaatctgtgttcttgctatttgttttctatttgtcccatttttctttattcttttgtttctctttttctgccttctttcaaattaatcgagtatttttatggtattccatgttgttctcctcggttgaccttcttcctgtacctctgtgtttttgtttttttgtttggctagggtagtcagggacttattttgtgaagcagagtagcagaaatagtcatgtcttatagattatccctgggagaggtttcttacctaaacaaacatgttagagtccctcccacatgttgaatagcttgggtgttaaaccatctgctaggcaacagcctttccttctcacttcgttttctcagataaagtttagagaatcaagaagttgctttttttgttattttttaatttgcaggttaaacactttaagatgagaaaaattgatctctgtctgagctctgaagggtccgaagtgattttagctacatcaagtgatgaaaaacacccacctgaaaatatcattgatgggtaagagttactatactttgttgtttacagtcttaaatcggtgaatcccttgagtacttggactgtgttttataacaacttgccctattaaacatagtttaataaatgtttggtggattacctgatatccacttttggtaccatttctgaaactaattgagttgtgtatatttaggtttttgatccttttctttataatgcctaaactgaactcttgatacaaataggtttttttagaagtggtttaccaaggcaaaaactcaaacaacttcattttatggaagtgtaaattttaaggtctggttatggttttactccgtttttcttggaataagaatgtaaatattataacttcctatttactacctatttccttactggtctaagtgatatctttgcagaactgaatgcttcattccttgctatcgtgtattgttttgcttctcccctttttgatatccttccaatttctactcttcattgtgctagagctttttctagctagatatttttctaaatattgttcttagacttcagattccaagaaaaagcagttaatgggaatgggaggactccttttttttttttttttttgagacagagtctcactctgtcacccaggccagagtccagtggcaccatcttggctcactgcaacctccaactcccaggttcaagtgattctcctgcctcagcctcttgagtagctgggactacaggcgtgcactaccacacctggctaatttttgtattttttagtagagatgggatttcaccgtattggccaagctggtctcaaactcctgaccttgtgatccgcgcaccttagccttccaaagtgctgggattacaggcgtaagctactgagcccagcctgagaactcttttttttttttttttttttttttttgagacggagtttcgctcttgttgcccaggctggagtgcaatggcacgatctcggctcaccaaaacctctgcctcccaggttcaagcgattctcctgcctcagcctcccgagtagctgggattacaggcatgcgccaccacgcctggctaattttgtatttttagtagagacggggtttctccatgttggtcaggctggtttcgaactcccgacctcaggtgattcgcccgccttggcctctcaaaatgctgagattacaggcgtgagccccctgcctggtggaggactccttttttaatagttctggcttactactttcttgaaccctctttcttggtatatgtacaatgaacagagtttgactcatagaatcatctaattgtaggactggcgggacttatgggtttattttgccaaaaccctttattttagacttgtggtaagagaggtctaaagaggttaagtactacttttaatcattgaaggcagaactggttgtaacagaggttttatgattctttgcatatcttgaagcccatgtatctggatgaaattctagcaactcagcctcttccttgaagcgtagttgtcatctttatggcaactgacttttctcctcagattcgtttatctctttgctgggctccaataacatttggtatatacctctgttaccttactttttcctttattgtagtgtttatttttaatgtttgttccctctctcaactgtgaattcctgtaagtcagagactatttctatgagtcaaacttgactaatactggaaagtaatcaaagtctacacacatacacacatacatataaacacatatatatgtatatataactgtacatttgcatagggctttataatttcatagatactttgtcagttgaccctcacagtaatcttggggaataagaagcacaaaaaagtattttcaaccccgttgtaaagatgaagaaaagaatgatcagatgacttgctcaaaataaaaatgacttgctcaaaattacacagataagcaagaggcagaatcaactgacactcgtgtcttctaacttgtacttcagggatctttgtgctacactaggttaactcaaatttagtttgaataaaaaattcaatatccactttttgcctgtgtcccttctttcttcttcttagttgtttacttcctgaaattcaggtaatagttactatcctactctgtcttggagtagaaaaattaatgtggcaactgctttaaggatacacagaactgaggagatttgccttaagttgtttgccagaaatagaggactttccagaaacactccttgattctgattggagatagattcgttttctaaggcaagatcaatttaccctgcactactttggtgatctttctctcaagcgagtatgttcatatgtttatagaacattaagattagctattatatatcacagttaatattttaggctctgtccatcttgatgaataaagacataatattttttagattagacaaaaactgttagtacgggaaaacatggaataatgtaattactgtcctgataactgaacagaatacatcggggacttttaatccatatgcagttccagaaaatataattagactgtatattgtagacactaaaagttaatttctggccaggcgcggtggctcatgtcttaatcccagcatttcgggaggctgaggcgggcagatcagttgaggtcagaagttcaagaccagcctggccaacttggcaaaactctgtctctattaaaaataccaaaaaattagtcagttgtggtggcgtgcacctatagtcccagctcctcgggaggctgaggcacgagaatcgcttgaacccaggaggtggaagttcagtgagctgagatcatgccactgcactccagcctgggtgacagagcgagactctgtctcaaagaaaaaccaaaagttattttctgttcacagttgctttatctaaatagagtaaccataggagtatttggagaaaacagtgctataaatgtgtccctacaggataatggaatattgttttatggccctgttccaaactctccattccttcagaaataagagttaaataaatagctgggcatagtggctgaggcaggaggatagcttgaggtcaggagtttgagactagcctgggcaacatagcaagaccgcatctctaaaaaaagaaaatgattatacttctacttttcctctgccgtttgtgtttaatgtgtcaatgaaaaaggggaaaagaagttctacactaggaaaaaaaaaagcaaagtaaaaaagaagagagaaaatcagtccttttggtgtagtgtagaagaatactatatttagaattaaaattcctgggtaagtgaattatgtgttatcttggtcaaagagtacatatattactctttgagcctcagttactgatctgaaaaatggggataataccacctttcctgctgacctcagaattgagaaaaaaatcacatgagataatccatgtaaaataggtgttagctataaattcgtatttaaaagaaaactaccactttgatgacttccttatacataattacaagatttagttagatgtcttttttattttttttgagacaaggtctcactctgtcacccaggctggagtgcagtggcacaatctcggctcactgcaacctctgcctcctgggttcaagcgattctcctgcctcagcctcctgagtagctgggactacaggcatgcaccaccatgtccgactaatttttgtttttttgagatggaatcttgttctattgcctaggctggagtgcagtggcacgatttcggcttactgcaacctctgcctcccaggttcaagtgattcttctgcctcagccttccgagtagctgggattacagatgcacgccaccaggcctagctaattttttgtatttctagtagagacagggtttcttttttttttttaagagacagggtttcaccatattggccaggctggtttcaaactcctggcctcataatcagcccgcctcagcctcccaaagtgctgggattacaggcatgagccaccgcgcccggcctagttagatgtcattttaaaattcaggtgatattttatgttattctattggttatgttcattgaaagcatccaaagaaaaacatgaggcaattaaaattaatgaatttcaataagtaaaatttaaaataatataaatatgaaaggagattgtaaaatattaagcattttataaaaacccagaattttgagttaggagagctggccttggctgggcaaggtggttcacacctataatcccagcactttgggaagccaaggcaggaggatcacttgagcccagaagtttgtgccactgtactccagcctgagtgagagagcaagaccctgtctcttaaaaaaaaaaaaaaagtagttctggcctttttttgggggtgggtaacaactttattgacatattattcacataccatacaattcgcccatttagaatatacaattcagtggcttccagcctattcacagagttacatagccatctccacaatcaattttagaacgttttcatcatcccaaaaagaaaccccacacaagaaaccccacacttgttatcagtcaccctgtattttcccatccatactagccctaggcaagcattaatctactttgtttctgtagattttatctattgagacatttcatataaatagaaccatacacatgtggtcttttgtgactggtttcttttgaaacagtgtcggagtgcagtggcgcaatcttgtctcactgcagtctctgcctcctgggttcaagcgattctcctgcctcagcctcccgagtagctgggattaaggcaggccccaccacatccgtctaatttttgtatttttagtatagacggagtttcaccatgttggccaggatggtcttgatctcttgacctcatgatccacctgcatcagcctcccaaagtgctgggattacaggcgtaagccacaacccccagccgtgactggtttctttctttcgttttttgtttttttgagacagagtcttgctctgtcatccaagctggaatgcagtggtgcagtctcagctcactgcaacctctgcctgctgagttcaagtgattctcatgtcccagcctcccaagtagctatgactacaggtgtgcaccactacacctggctcatttctgtatttttagtagagacagggttttaccatgttggctgtgctggtcttgaactcctgacctcaagcaacctacctgccttggcctcccagagtgcttggattacaggcatgtgctaacacacctggcctggtttctttcacttacatgttctcagggttaatccatgttgtagcacatatcagtacttcattcttatttattgtcaagatttcattgtatggatatagcacattttatttacgcattcatcagttgatggacatctgggttgtttctacttttgagctgaatttttcccaattttattttaaaataccaacttatagacccaaaaaactcagcaagccccaagctagataaatacagacattgtatcttagtcaaactgctgaaaaaggaaaaaaatatttaaaatagctagaaggaaataaaaactattatatacagaggaacaatagtgctaatgacagctgactttacatcacaaacagtggaagccagacaacaatggagcaatatcttttaaatactggggaagggagaaacaagcaaatatttaaaaaccctgtcaacccagaattctgtgtctagctaaactatcttccaaaaatgaagataggataaaggcatttttcatcacaagtagacctgcatcataaggaatgctaaaggaaatcctgcaggttgaagaggtataatattagatggaaaatcaaacctataagaagaaattaagtgtactggaaatgataaatatttgggtaaatataaaagactgcctttttttcctcttttaatttttttgaaagataactgaccacttaatgaaaaaaactgtattatgggatatattatatatgtaaaatatatgacaacaatggcacaaaagtgatgttcagtgtaaattgactatcatgaggtttttatgttgtaacctagagagcagctatttcaaaaatttctaataaaggaggtatagctaaaaaaaaatagaggaattaaatggaattttaaaaaaattattcactcagaaacaggagagaagaaacaggacaagaataggagggagagacaaaaatgaatagcaggatggtagacttatacccaaccatatcagtagttacactaaatatcagtgaggctaaacactccagttaaatatcagattgtcagactggataaaaatccaagacccaaatatatattgtctaaaagatatgcactttaaatataaagatatgaatagttgaaaataaaaggatgaaagaagatgcatcctacaaacagtttacataagaaagtcgctgtagttatattcatgtcagacaaaaatataagacaaggagtattaccagagacaaaggggacacgttatagtgttagagagtccgttcattaggaagagaggatagctgggtgcggtggctcacgcctgcaatcccagcactttgggaggccgaggcgggcggatcacgaggtcaggagatcgagaccatcctggctaacatggtgaaaccccgtatctactaaaaataaaaaaaattagccaggcgtggtggcgcatgcctgtagtcccagttactcgggaggctgaggcaggagaatggcatgaacccgggaggcggagcttgcagtgagccaagattgtgcactgcgctccagcctgggcgacagagtgagactccgcctcaaaaaaaaaaaaaaaaaagagaaaaaggaagagaggataatcctaagtgtatatggacctaataatagttctttaaactacataaagcaaaatctgacagatgaaagggagaaatagacaaattcacagttatagttagagattttaatacccttttctcagtaatgatagaacaatttggcagaaaatcaataaagacatagatgatctgaataatgtcataaccttgactttgttgacggttatagaacactataatcaacaacatggaacaagaatgtattgatgggttgtgtatggtggctcacgcctgtaatcccagcactttgggaggccatggcaggcggattgcccgagctcaggagtgtgagaccagcctggacaacatgacaaaaccccatctctacgaaaaaacacaaaaattagccagtcatggtggcgtgtacctgtagtcccagctccttttggagctgaggcatgaggatggcttgagcccaggacgtcaatgctgcagtgagccaagattgtgccactgcactgcagtctgggtgacagagcgagactctgtctcttaaaacccagcatattgaacattcactgaaatgtgctgaaacataaaataagtctcaatatatttcaagattaaaatcttagatagtatgttctctgaccactgtgtaattaaattagaaataaacaacaaaaagatattcagaaaaccccccaaaacttagaaattaaacactgcacttctaaataacccatgggtcaaaaaagaaatcagaagggatcttagaaaatctttcttttttttttttttgagatggagtttccctctgtcatccaggctggagtgcagtggtgcaatctcagctcatggcaacttctgcctcctgggcctcagcctcccaagtagctgagactaccggcatgtgccaccacacctggctgatttttgtgtttttagtagagacggggtttcaccatgttggtcgggctggtcttgaactgctgacctcaggtgagcaccctccttagcctcccagagtgctgggattacaggagtgagccaccatgcctggccttagaaagtatttctaacagaatgacgttgaaaatgtaacataccaaatttgtaggatgcagctaaagcagtgtctcaagggaaagtaatagcatatatacttatgttaaaaaggaaaaaaatgtaaaaccaataatctaaattttcaccttaggaagctagaaaaaaatgagcaaattaaacccaaagtaaatagaagaaaataaatagtaaaggtgagagcagaaatcaacaaaatagacaattattagaaaaaataataaagcctaaagttgattatttgtaaggattaataaaagttataaacctctaacaagattagccaagaaataaagaaaatgcaatttattagaaccaggaatgaaagtaatatcactacagattctaaaggaatcatatataaagaacaaatttaagctaatacatttgacaacttagatgaaatggacagatttcttgtaaagctcgacctataaaaataacacaagatcaattggaaattctggacagcctcatatctattatggaaattaaattcggtcaaatatttagggaagaaataccagtcttccacaaactttctcaaaaatagagaaggaaacatttcccaaattgttttatgagaacaacattatcctgatagcaaagcctgacaaagacatgacaagaaagaaaatggagcgcaaaatagtacaaccactttggaaagctgacagtttcttataaagttaaatatacttttaccctatgtcccagcaattccactcttagtaattacccagagaaatgaaaacatgttcacaagcacttgtacaagaatacttagagcagctttgttcctaatagtaaaaagctgcaagcaattaaaatacccaacaaaaatatcaaacaaaatcacgaatggaaacattgtagcatagttggtggtgatagaaatcagagcactggttgcctaagggaggtagggattgtctggaaggaaagataagggaaattctggagtcacggaaatgttctgtattttcattggagtattggttacataagcgtatacatttatcaaaactcactaagttatgcccttaaggtaaattccactgtaggtaaattttacttccaaaaaaagaaaagcttatatagttaaaatagaaatgattatttctgtagtcaaaaccataatatatactattttgcctatatatgacttaaaattgagtgcatgttttaatttttgtttgaacaaacatttagcatgtgtctactatgggtgagccattgtagcagttgtagggttacaaaggtgagtaagagaaagaaactggactcagagctcagcatctagtgggagccatagaaacacaggagattaagtgccaatgtagagatggaggctgagtatgagataagtgcaaaagagggaggaagtgattctgatttggtggggttagataaatgggaccagaaagtgaatgaacttatgcaaggggaagaacggtttttcaggtaaaaaaaaaacctcatgaatgaactaaggtacagaagcaagagcctgcctaacatatttgcagaattttaagtggcccagtgtgaccacagtgatggaagagactataacttaatggtggaaccagatcctacagtcttaaatgccatacgaaggagtttagaattataggcaataaagggaccactgaggcatttagatagaagtgacatcaattccgtttctgtgttttagaaaagaatacctggtagtagtaaagaagaattattaaagttggagagagattagaggcagaattaacagaaaggagatgtgagaatccagtagtcatttaattttaaaaaacaggtattcaataaaattttatgattaaccatttatatttggctattcttattttttctttaaaattaacaataggaatccagaaacgttttggaccaccacaggaatgtttccccaggaattcattatttgtttccacaaacatgtaaggattgaaaggcttgtaatccaaagttactttggtaagcaaatcttacattaattttttttttttttttttggtgctccaggtaaggctaatattttagttttcattatcctttcattttttccacaggcagaaggcatatatgtaaacttttggcaaaacactagtttttctttatagcatggaatccagttttattgctggggtgaaaggatggggattatgaggtaaatgccttgagctcagttggcctctctcaaactgcaaattcgaaacccttccaaagcacataataatttccatgcaatttactatgtaaaagtctttggcaaaaggccctattaggaacataagactccagcttgctagaacactattccatgacatctttattctagattcatttgtcctggagttatttgtcaaattcttgttgaaaatctgataactctgattatttacattggatagttgagattcttctattactagtggcattttctcaggaatttagggggataatctcccttgggacatcattctaatcctatttatttaaagataaaatgtatcagacaaaatcatggcgggaaacagaatacatcccagatggttcaaatgaagaggctctattgatggggctacttgcaaaattatggcctgggttaagggaacaaacaaggcaaggaatgatgaggccctcagaaactagctatagcaggaagctgtaactagccctggcacagggaaggaaatagtgttatcagagatctgtgagagctgaagcctgtgtaaaagggcctaataggagctgtaggcaggagaaactgtcaaagatgtcacactgaagcagggagggagtggagataaaattggctgatctcccttccccaccccagtctccccctggtgtctcccactggccaaatccaatccaatcagaagccagtgggtaaatgaatccaggtgatagagtccacagaggttagcccctcatggcacagaacaggacaaagaagaggaggaatggatctggagtggtagagactggactggagcagtggagaaaaaccagtttagaaggaagatgactgtattcctgataagtctcttctctcattaatcgtggaggttctagagtcatacctaaagtttgaattccatttctggcacttatgagctgtatatcattgaacaccttgcttggctcctctaaacctgttttctcaccagtaaagtgggttaaagtacctttctcataagattgtagtcaaaagtgaatggataaatatgtttgactcatcataggctctccataaatgtttatgaccaagaccaccaatagtagtattatcgccatacacacaaaaaaatcggaacaatgccaaattcagaaaagctctacttgctctgtgttgtatggttgcgaacatttggaagattagttacacaagactatattttaccatagggttttttggaaacatacagagtaacttccatgttgtttctgatcccagtgctctgtgtagttccactgtgcatgataatctcaggcagagggaaaaagaaatatagggacaaaaacatacagccagattaacactttacttactttgtttacaatgttagtacagaccttgaagattgaaaaaagcacgtctaaagagccagttgattttgagcaatggattgaaaaaggtatgtgtttcaccagcattgttctgagcatgaaggagtagataatattcctttgattctgcatttctcatctagctgcactttggtgaaaaaagatgactttaatgatccttgtgacacatttagggtctagaaagacccaggtttgaatacaaagctgcttcttcatttactggttatataagtattaacatgtgacttaatttttctcagtttcagaatccttattaggaaaatggtgatgatatctatcattcaaggttttggtgaactagtgtctggcatataatagacaataaatattagtttctcatcttctttccttttgtcctgattaagggtactatttaaatatcaccagcagaattgatagcctctacttaattaaacacagcatcttgccttcatatgtctattttccctttcaaaataccatgaaaataatattaaaggaataaaaagaggcataaacctacaaggacaaaagatttaacaaccagcaaactaaagcaaatgtgagagatcagtgtatattatgataaagagaaagcagattgaagagtagtaacttctttagctgaatgaactgtgttataacctaaggtcttgacaaggagcatgtcaataagaagcaagccactttgccacacaaaaccccagaaaggcctagagctcaaaggcaacaggtgccatgggaagtatgaatgagacctgggtcagaaaacaaggatgattagttgaacatctatttacagagtaatcagactctaggtaccttcttccgtcctacaaaactaggtgaccactcctttatcccacagacctccaccacaaccctcaagagacaactgcaaatatagaatgttgaggctcaggagaccagatatagtagggagtgagtgagacatggagttgaaaatacgatactagtggaagcctacatattgaatagtgggaacaccagcctccttcctgtgttctggtattaacttcagcagccaagaatataccctcagctgggagactggaacattcatctttggagaaactaaatggccctagaaaaaagacctatggatactgacaaaggccagctcatttctggtcaccttatttaagtccagtaatcaataagtgtggctcatgcacacagttttcaaatgatgcacagttttcaaatgatccacaagtaacaaaagaaagatcacaagacattaatgaagacctcaaaccctgaatataatcaagcttttagctctaatttccaatctataagaaatgtagaggatagaggaacaaattaagtgaaaccacgaatagacaagatgataaaatctagaatgtggggcctgggcacagtggctcatgcctgtaatcccaacactttgggaggctgagggaggaggattgcatgagtccaggagttcaagactggcctaggaaacatggcaagatgttgtctctacaaaaaaaaattaaaaattagccagggatggtgacatgtgcctgtaatcgtagctacttgggaggctgagatggaaggaccacttgagcccaggaggttgagactgcaatgagctgtgatcatgccactgcactccagcctgggtgacagagcaagaccccatctctttaaaaaaaaaaaaaaatctagaatgtgggacattgtacaggacaactgacctggtctcttcagtaagtcaaagacattaaaaaatgtgtgtaggggagagaaagcagttgaaggttaaaagagacttaattctgattttaataaaccaattaaaaaagacagggacaattggggaaatttgaataggaattgggtttcatattatattaaaccactatttttaatgttatgatggtggtattatggttatataaagaattattatttagaaatggataattaagtatttaggggaagctaggctcacgcccataatcccagcattttaggaggctgaggtgggcggatcgtttgatctcaggaattcaagaaactaccctgggcaacatggagaaatcttgtctctacaaaaaatatacatatatatttgctaggtgtggtggcatgcacctgtagtcccagctgcttgggaggctgaggaaggaggatcacttgagcctcagaggtgaaggttgccatgagctgagattgtgccagtacactccaatctaggcgacagagtgagaccctgtctcaaaagaacaaaaaagtatttagagatgaaatgtcaataatgtcttacacttgcacttgctttaactttttttttttttttttttttgagactggagtgcagtggcgcaatctcggctcactgcaacttccgcttcccaggttcaagtgattctcctgcctcagcctcctgagtagctggaattacaggcgtgcaccacgttgcctggctaatttttgtatttttggtagagacagagttttcaccatgttggccaggctggtctcaaactcctgacctcaaatcgtccacccacctcagcttcccatagtgctggtattataggagtgagccaccacacctggcctaaaatactttagtgaaaaaaaaaattgataaatccactatgatgaaatgttagtaattataaaatctagcttatgggtatatgtgggagtttttttatgttctctcctaagtatgtttgatatttttcttttttcttttctttttttttttttgagactgagtctcactctattgctcaggctggagtgcagtggcgtgatctcggctcactgcaagctccacctcctgggttcacgacattctcctgcttcagcctcccgagtaactgggactacaggtgcccgccaccatgcccagctaattttttgtattttttttttagtagagatggggtttcaccgtgttagccaggatggtctcaatctcctgaccttgtgatctgcccgcctcagcctcccaaaatgctgggattacaggtgtgagccaccatgcccagccgatatttttcaatttttcataactaaaaaaactaagcaaatgaaaaagtttattattaatttctggtgatagagttgtacaagaaagaaaatatcattataatgtattatttcaggagtaaataacctttagatagacagagtaatgtaaccatcaagtaggatttcaaatttgagaggaggtaaagagggagaagttgaaggaggaagaagaggggatttcggttttaaaaagctaaaattttacctaccatactatataaagtcagtaaaaaatttatcaaaaaggaataaaagcatattataatttcaggaaaaatagcttgaagagttgagaatgtttacttctaggaagcaggactagaggagaaagaaggggtaaagcagattactgattttcattatttcagaaaagggttaggaaacagaaacacagagacttctcttttaatactacggggcttttacattgtgtacattatttaatgtgaagttaattttgaatactgtcattagctatcttttttgttgttgttgttttttgagatggagtcttgccctgtcacccaggctggagtgcagtggcacgatctcggctcactgcaagctccgcctcctgggttcacgccattctcctacctcagcctcccgagtagctgggactactgacgcctgccaccacacccggctaatttttttgtatttttagtagagacagggtttcaccatgttagccaggatggtcttgatctcctgaactcgtgatccgcccacctcggcctcccaaagtgctgggattacaggcgtgagccactgtgcccggctgtcattagctaccattatagcaattaaatctttcatgtttccagaagaattgtttgatatgattaactcatgatgaaataaattaatctgctctaaaattacataaggaaacatttttaaaatttggataccagaaaagattacttcatgggccacacaattatgcatcatagtgaaagtttcactgagaaactcagctctagttgtttcccgtggctatggcaaaatggctcctttctgttagtagctggatcctcaaatgttcacttttttttcttgaaagggggattttttttaaataaatgttttaaaaagaaattttcacattttatcagttccttatatccttttactattaatataattgacctttgcatttccttttgcttatactcactaggatattttatagctcatagtttatcttttttgccttgtgtatcatatacctatttttaaattaaatttcaacatgcaaacgatgattccttcaaacctggtctcataatttaccagatatcatattttgctgaacataaatttcaatagctattctcatgtattttgacccttaactcatttcttctgttacatttatgttttagatttggtacacacagaggggcagcttcaaaatgaagaaattgtggtaagtgaatatactttatagaattaaaaattaacctgcacaatgtatttagactttaacctatctccatagtcatagttaataaatttcctcatgatattataggtttgtacctaaatcaaccggtagagaaagttattctcaataataatataagctaaatgtacattcataaattaggttcttacctttcatagagagtgacggcaagataaaacaattcatttattttttgttttatttttctcattcatttactttgaagtatttatttggtttgctttctttcatttgattctgtaggcattttagaataggaatgaaaaaagggtcgcgatgccaaaattgaatgttaatttaagcatgaaaggacaagtgagattcatataaggggaactagagcataggatcagcaacaaataagccaaagagagatgaggtggaaagacaaccagtatttttcgacaacattccattgggctttgcttgtcaagtgaaatgaatgcccgttgatgaggaagctgctgcctcatcaggagttccgctattcctggtagttggtcaggccctggttttagacaaacacaaaacaactgaatatctattaggtggtcatgctttgtttaattaaggtttccctaaatgagggttaaaatagtaccttatccattaagtttacttcttcacaacttgccagaagctgctattaaatcagtgtttcaaaaaattctgtaggaagtttttgaatcccattagttcctttctctcccaccaaaattcacccaagtactggggaggccagtgaggtcctgaaaaatgattaatgttactgaattttatcttcctgtttttttctgtctttacctagtgggttatgattagtaagcccctgctacctttcgtatattgtttcaggactccactgtggagggttacagcattatagaaaatttggaaaatagcaagggggaatgggaggctggaaatcacccagaattttattaccctgtcacaaaaacttttactgtatttattttcttctagttgttgaccatatgctgtacagttagaataataatgtgtgaacaattttgtgtcatctttttttttaacttagtattatatcacaggcttcgtaagtacaattttaaaataacatttgccagttggcatacatttaaactaattttctttttcttccctctgtcattacacagtttgtcccctctgtaatacacaggggacatctatgcatattcctgctactggtaccttcaccttttttcttactttctaagattaaatttcaaggaatagaattactgggtgcaaggttgtaaacatacttatagcttttaaaatatattggctaattgctttccagagaaattatataaatataaaaatgtagtcatgcttcagggtagcgtattctgaggcaacattaaccaaaggaaacttctttattatgaaaaatactttagaaagacactttttttttttttttttgagacggaattttgctcttgttgcccaggctggagtgcagtggtgcgatctctgctcactgcaatctctgcctcccgggttcaagcgattctcctgcctcagcctctcaagtagctgggattacaggtgcgtgccaccacgcccagctaatttcgtatttttagtagagacagggtttctccatgttggttaggctgttctcaaactcccaacctcaggtgatctgtcggcctcagcctcccaaagtgctgggattacaggtgtgagccactgagcccagctgacacttttaaaaaattagaaactgggcatggtagctcatgcctgtaatcccagcactttgggagactagctttgaggctagttcaagaccagcctgggcaacacggtgagaccctgtccctacaaaaaatgagagttgcagtttttagctccagttgctatttttcatcaaatcaaggctggtatttagctgatatgtaccacaactattatatgtagctggccttatgtgttgttatatatttagaatattactcttgcatcaagctgtttcttttgctaactgcttgttaacagttaactagcactgctaaaagcatttatattgatttttttcccatacaggcacatgatggctccgctacttacttgagattcattattgtatcagcctttgatcattttgcatctgtgcatagcgtttctgcagaaggaacagtagtctcaaatctttcctcataatgataacaaaatgctcttgcatgattttttaacaatatatttaaacaggaagttgtcactgatatactttattaaaaggatttttatcaatttgtttcagtttttatttacattcttttcaatatttggggtaaaggaattctgtttttatcaatcagcagtactggccaccatgggggaaattagaaaggtttggcttcagtatatagcttaatcaaggaagtgactgcacatgaaaatttaatgggtaatacattgcatccccacagcatccactctggtgctcttcagatcgtagtgcattaattttttaattgattgattgatgcaaaggactaagtgagcaatatagacagtaaacaatgtaagaagtcagaaaagagaaagtacttatggaagggtttcactgaggttatggaacctgaggtgggccctgtaaaacgagtgattttactttttaattaaaaaaaatatttttttgcagtagggtctagctgtcacccaggctatagtgcagtggctcgatcttggctcactgcagcctccatcccctggactcaagccatcctcccacctcagcttcccaagtagctgggactacaggtgcataacgccatgcctggctagtttttgtattttttgtagagaaggggtttcaccgtgttgcccaggattgtctcaaactcctgagctcaagcgatctgcccaccttggcctcccaaagtgctaggattacaggcatgagccaccgcacccggcctttacttttatttgttctggcttgaaaacctcagagaagggttagaaacacataatcttactttttgttgttgtttttgagataaagtcttgccctgtcacccaggctggagtaaaggctggtctcaaactcctgggctcaagcaatctgcccacctcagcctcccgaagcattgggtttgcaggcgtgagccaccacacccggccctctttctcttatttaagaatactatttcttaagtccatgaaaagatctagaagcagtgacatccaagtatcagtgagcacatcaaatacccagattgtgatctctaaatacctttcccattaattggaaccaagactctttggaggaatggccaattccaaaagtgtgacaagaaatagacaagattagcctgggacattttgttgtgccagaaagtagactaatggataatgtcaagaggatacagaagctaacatgaaggtactcttattagaaaaaaaaaaaaaaaagggcaatttgagcaggaaaaaaaattttacagttgactacaaccatactgaatatatttaaaagtgaatccatattgatagaagagaaaaaataaaagaccaaaacaaaaccctcattggactccatgggatgtaactagggcagaattactcatttgaatatttgtatttaaaaggaaagaattgggcatctatcatgtacagacataaccctggtagatgagagaaagtgctttgcagaagaattcctgctcattgatgtggaagatatgatagaattagagaatcatcattagtccaggcatggtggcccacacctataatcccagcactttgggaggccaaggtgggaggatggcttaagctcagaagttcgagaccagcctgagcaacatagctagaccccatatctacaaaaaaagttaaaaataacaaaaccaggcagagtggtacgtgcctgtagtcagtctcagctgcttgggaggctgaggtggtaggtttgcttgagcccagaagatcgtggcttcagtgagtcatgattgtgccactgcactccagcctgagtgacagagcaaaaccctgtctcaaaaaaaaaaaggaaaaaagttattgatttgcatgaaattaaacattgatataggcaacaatcagtggatgagcattaattgaaagattggtggggaactttacaatgcagggatctgaatctattgatttattaaaaatggattaaccagtgtatcagttagcttttgctctgttacaaaccacttcaaagcatagtggcttaatgcaacaatttcatttgctcacaattctggggatatgctggcagtttttttctggcttgtgcttgctttgctgtatctgtggtcagctggcaactcctatggtctagatagtgtaggatgacttcactcacatattttaaggtttgcaggttagggatctaggtgcctcagcaaggactgttcatctctgctccaagttgtttcttgtcctccagggggctaacccaggctttttcagatgatggtctcagccttctgaaaagtagcaaagagggaaatccccagtgtgcaaagttttctttttcttctgctatctctaaatacagtgcaaatggtctttgagtctctgtttgccatcagatttgctgttgtctgcttgccaaatcatgtcatgtgtccaagctcagagtgaaaacaagaggtacctgcccaagggcatgaatacaaggaaatctgaaaaaaagggccaagcacggtggcccatgactgtaatcccagcacttagggaggccgaggtgggcaaatcacctcaggtcaggggttcaagaccagcctggccaacacggtgaaaccctgttttctactaaaaatacaaaattagccaggtgtggtggcatgcgcctgtagtcccagctactcaggaggctgaggcaggagaattacttgaacctgagaagcagaggttgcagtgagccgagatcacgccattgcactccagcctggacaacaagagtgaaactacatctcaaaaaaaagaaaaaatgggctggggtgagagggagccattaatgctacaatctactacagtcaaacacagtatgcttcctgatgtgattttatgtgaagcacacagaccagcctatgaagtactcttgccaaaattactgaacctgaatttaatcaaactctagagataacctccattttcaggaaactcaagagatagaggaacaagtaaagcgacactgcaaggaatcaaatacactagtagccagtaatacagcttactgaaatgtccagatttgtgcttttcctggacgtggcaagataatacttctggcatttgcttaagtagtgccatgtgaccagttctggccaatgagatgaagaataattgacttcgaggctgaggcatttgattgcctatgtgagacccttcggagttcttttcctcctgtgccgtaattgaccaacaatgttctacacagtaactacttttatcagtctgggtctggaagtgatactgatgtttaacaggtagcagggctcctcaaatctttcctagtaattataacaaaatgctcttgcatgattttttaacaatatatttatttaaacaggaagttgtcactgatatactttaaagtatttgtatcaatttgtttaagtttttatttacattcttttcagtattttgggtaaaggaattctgtttttatcagtcagctgtagctcaatctgagatgggtatgtaggaggagtaagaaattaagcttcattgttttaagccaatgagattttggaattgctcgttaccacagtataacctagcctatcctaactgatagacaagtctagaatgtggctcatcctacagggcaagcgacctggtttcttcaaaaagtcagtggcataaaaaatgttaattaaggaaaggggcctgctctaaattcaaggagacctaagagctcctatgaccacatgccatgtgtggatcgtgatggatgctgatttgaatagacaaactgaaaaatgactttttttttttcttttttgagacggagtttctctcttgttgcccaggctggagtgcagtggtacaatctcagctcactgcaacctgtgcctcctgggttcaagtaattatcctgcctcagcctcctgagtagctgggattacaggcacctgccaccacgcctggccaatttttgtatttttagtagagttgggggtctcaccatggtggccaggttagtctcaaactcctgacctcaggtgatctgcctgcctcagcctcccaaagtgctgggattacaggtgttagccactgcgcctgaccaaaaaaggacattttaagataattgaggaaattttcttgtagactgggtgttattccttttactatgtgtgatactggctttaagcttatgtaataaaatgcatgagcttaaatgcatatagaactatgggtgactgaaatgcatataaagcatatgagatgcatatagaactatggatgactgaaatggcctgataatctggaatttgcttactatttaagcagagcctttataaaggaaagagggttagttgaagaagcaaatgtggcaataaattattgaatctgggtgatagatatatggaggttcattgtaggagtatttctacttatatatgctttaattttatttattttttttttttgagatggagtcttgccaagtttttctttttttttgagatgtagttttgctcttatcccccaggccggagtgggatggcgctatcttggctcactgcaacctccgtctcccgggttcaagcgattctcctgcctcagcctccctaggagctgggattacaggcacctgccaccacacccagctaatttttttgcatttttagtaaagatggggttttgccatgttggccaggctggtctcgaactccagacctcaggtgatctgcccacctcagcctcccaaagtgctgggattacaggtgtgagccactgcgcccggcccggaaaagcaaattttaaatggagaagagtaggaaaggcatttcaaaagccaccttggtataccagataagagatgtgaaggtgagtagtcattcataatgatgaatttggggaaagatgaataaaaaagtctgagtagagcaaaaagtgaaactaaaactgaacattacggctagatcacaggctttcaggtattttcttgtaacactggaaccatttaaggtttttgagaaggaatgtgaattatagcaattgtgttcatgttcaataaaatgaaatgctgagcattttctttttgccaagtttctaaattgaaatggcaataactctttgtgtaagaaacactgtgttgaggcttacagattgctaaaagggatctccagaggttatctgattgatttctttggcacaggcctggtgagttatctttaagtcttttttctctgtcttctgtggatgcaggaaacaattgatgactgtagaacacccatttcatatacggtatttgaaaacagcatgctttaaacttcatttttctaggctttaaaaaactcattctcattatcaccttaaaccactccacatttcaggcaatagatatgatatgtagctttacctttttgctttgttttgtatttcactgctgaactaccccaatcacctctttttttttttttttttgagagcaggtctgttgcccaggctggagcgcagtggcacaaacacagctcacagcagccttgacctcccaggctcaggtgaccctcccacctcagcctcctgggtagctgggactacagacacatgccaccacacctggctaattttttgtatttttatagaaatgtggtttcaccatgttgcccaggctagtctcgagctcccaggctcacaggatcctcctaccttggcctcccaaagtgttgggaatataggtgtgagccactgctctcagcccctcacctttttaaactctcatttgtcctcaactggcatcctctttccctttcatgtggccttttctccacctgcccatggactcctgactgccactgtgctgtgtgtactatgtattgaggcctttgtgtttgctgtttcctctgcctgtagtgctcttgccactggtgtcagtatagctggcttcctcattgacatcaggtccttacacaaaatttccttctcaataagcctttctctggcctccctattaaaattagagtgttcctgcaccttaccctcgcaagacaaacacattaaatctttcttccctgttttatttttcttcttttcttaggttagggacctgacgcagtcaccctgtgttctgtatttaggagttcttatacctgactcttcatttctatcattaaaattccacttaaatttttttcttttaatgatattaatgatggcccaagtatcctttgaaagatgagggcagtgccacctgcattcaggtgtgatcctcttgagtaggagatttaatccaattgaattactcggggctctctcacccttatagggacagccctgcttataactgtctaacgtattttttctgtttaccatgtatatcatgtttatcatctctctcactagaatgtaagctccccaaggcagggggtttttttgcttctgctcatgactgtatcctcagggcttagaatagtgcctggcacatatattctcaagaaatatctgttgactgaataagtgaacatcgttcatttatttgcacgcctatatctctttatactgtagaatctttgaggagctttgaataaagctagtcaacaatatatgaatttttggatcacttactgtggaccaatgcctatcacagcgccttgcataaagtttaaaccagtaaatacttatttaaagcgatggataaaaaagtaaaaatttaatgacctttttaccatgtaccaagtctaggcaaagaaatattacagaaatgaaaattgtgtttatcactcatttatacagatttttttttatagcatattgcatttgttgagccctctctcaggaatgcctctctgcaggggtcaggctgggggaggcatcctttgtgggcttcaccttctaggtgatgttccagcaaccctttgtaacttgaccctgatagccttctgggagatagtgtgtggcagtgtacatcaaagttttaaacatgcatgtagtctttgacacagaaattccatttctagaaatatagcctaataatcagataaaggaatatacaaagataagtggacaaagtttatagcaatgatgtttataagacagaaaaactggaaactactacgcagccatatattagaaagtatgatatatacaaacatcattttataatgggatatgaattttatatatatacatatatatgtttataaatataaaaatggatacttctggttaaagatgatggggtaaagcgatttttactccatcccctttctcaaaacattcacaacaaaaagaattataaaaagaaaaacattttatcttcaaggaagcagctataatccctaacatcaaaatgggacgcccactcactaagtactgtgaaatgaggattttggtgaaggaagaagctgagaactggcatatgttctctcaaagctagagactttattaaacgtgtcatggttatgaaaggcttatccaacagtcccttgattagattgaagagggctgcaggtggctcaggaggatggagaatgtctccagagagcctcgaggttaataacagaatggcagggaagatggagctggagagaatcaggcaggatacaccagaggagactgctggaggtaaagcatgatgaaggaagttgtcttagctccagctgctgtaacaaaataccataaactgggtagctgaaacaacagacatttattttctcaccactctggaggctggaagtctgagatcagggtgccggcatagtttctggtgaaccctttcttcctgcgttgtaggtagctgccaccttgctgtgtgctcacacgagctctttgtgtgtgtgtgcagagagtgcactctggtgtctcttaagggacactattcctgtcttatcaaggccacacccttatgacttcatgtgattttcattacctctatataggccctgtctccaaataaaaggaggttaaatcttcaacatatgcattttgggggttagaggggcacaattcaatccatagcagaaggtgaaaaagcatccaaagtaaagggagtgtaactgaaggggatttccctgagccccatctcaaaggaaggaatttagttaataataggctactcaagacagcgaatgtcaatgaaagttgcagattgcgccacctgactcctcatcccacactatgtttcagcagataacaagccccactaatgaagactcataatcagaaaagacccagaaggggactgctctgggtcaggttctctagaagcagagcctccaacaaggattctttgaagagtgatttattgagggagcgctctcaggagaaacctctaaggaagtgagagaagcaggatcaggcagagggaaaaattaaacatggcttctgctgaagtctagcctcagtctgatcccatagggagctctgaagcatgactggcaccggagaagtagactgccccaccttgcagcaagggaaaaggctttggaatttcaaatccatcagtcactggctgtgggccacactcaggtgaaggacataatttcacaggtatttctgggtaagatagctcctgtcatgagggcaaattctcaggaaagagtgcatctgtgagccattagcagccaacactcacagcagctggctcatgagtacaatggcttggtaaaaggcatctgggcagagcaccaacaacacctactatagcagcggttctcaaagtgtggttcctgggacagcaggatcagcctcacctgagaacttgttagtaatgcaaattccctagctcaacctcagatctgtcgaatcgtaaactctggagatgagaaccaagaatctgtgttgcagcaagccctccaggtgattttgttgcatgcccaagtttgagaaccattgaactacactggcctatggctagcaactgtaaaacaaaaggattggaattgaacccaaacctcttgcagtctcctgcacatagcccttttcccacctttgcccttgtagttctcctcacttgaaatgcccttctcccttcccatcttctccaggctcccatcccaaattatggaagtactgggcatctttgaagaccagctcaaatgccaccagctccaaaaagcattgttggattcacccagctcagaggattgctgtctcctctgtgccctctgagcacttagtcttcactctaacatatactccaccttgagttatggtcattggagtgtatgtctggtcccctgtgagattaagctgctggaggacaacagctcttcctcgtccatctttgcataactctgcacccagaaaagaatcaatgctcaatgtttgatgcattaagttgaagagaatctaattggaaagccgggggtctatttttgtcattctgaaaagctcctcagttccagctactattatttagtgaaaatggggagatttctgtgcatttgtagacacgaattggaagaccatcagagaagtgattcagaagaggcttgccttacatcctgtctccttttgtgcaacttagtacttaggaggaacagtgagtgctcatctgtgcttcagtcccatcattgtcacagcttctcattttcagtatagcctcacaaactcatgcctatgttggtcatgagtggctttggtaggatggggaatttttattcagcatccatattgtcttgtcctccttccacctccaaccccccaaaaaagggcccgaggaagcagttgtgggacaataattatgataatcgtaataatagccaacacttcatgacactttctccaagtcaggcacagttctgagtgctctactcatgaatctatggactaggcactattgataccctgttttataggtcaagataccaaggcagcttgatcaaagtcacccagctggcaggaacagagctaggactctggccttgaagttagagatccggtttgaatctcggcttgttacttactagttctgagaagttatgcaagttacttaactctctgagccttgatttcctcatctgtaaaatggggataatcatctcctctttgagatatatagagattaaatgagataacatatctgaaagtgactgtgcctggtagatg

SEQ ID NO: 888 - DNA, 559 bp, Homo sapiens
agggccgagggtttggaactcgcagaggttaaacactttaagatgagaaaaattgatctctgtctgagctctgaagggtccgaagtgattttagctacatcaagtgatgaaaaacacccacctgaaaatatcattgatgggaatccagaaacgttttggaccaccacaggaatgtttccccaggaattcattatttgtttccacaaacatgtaaggattgaaaggcttgtaatccaaagttactttggtaagcaaatcttacattaattttttttttttttttttggtgctccaggtaaggctaatattttagttttcattatcctttcattttttccacaggcagaaggcatatatgtaaacttttggcaaaacactagtttttctttatagcatggaatccagttttattgctggggtgaaaggatggggattatgaggtaaatgccttgagctcagttggcctctctcaaactgcaaattcgaaacccttccaaagcacataataatttccatgcaatttactatgtaaaagtctttggcaaaaggccctattagg

SEQ ID NO: 889 - protein, 74 aa, Homo sapiens
MRKIDLCLSSEGSEVILATSSDEKHPPENIIDGNPETFWTTTGMFPQEFIICFHKHVRIERLVIQSYFGKQILH

SEQ ID NO: 890 - DNA, 585 bp, Homo sapiens
gagcccggaaggtccggcgcccagagctaacgggagtcccaggttaaacactttaagatgagaaaaattgatctctgtctgagctctgaagggtccgaagtgattttagctacatcaagtgatgaaaaacacccacctgaaaatatcattgatgggaatccagaaacgttttggaccaccacaggaatgtttccccaggaattcattatttgtttccacaaacatgtaaggattgaaaggcttgtaatccaaagttactttgtacagaccttgaagattgaaaaaagcacgtctaaagagccagttgattttgagcaatggattgaaaaagatttggtacacacagaggggcagcttcaaaatgaagaaattgtggcacatgatggctccgctacttacttgagattcattattgtatcagcctttgatcattttgcatctgtgcatagcgtttctgcagaaggaacagtagtctcaaatctttcctcataatgataacaaaatgctcttgcatgattttttaacaatatatttaaacaggaagttgtcactgatatactttattaaaaggatttttatcaattt

SEQ ID NO: 891 - protein, 144 aa, Homo sapiens
MRKIDLCLSSEGSEVILATSSDEKHPPENIIDGNPETFWTTTGMFPQEFIICFHKHVRIERLVIQSYFVQTLKIEKSTSKEPVDFEQWIEKDLVHTEGQLQNEEIVAHDGSATYLRFIIVSAFDHFASVHSVSAEGTVVSNLSS

SEQ ID NO: 892 - DNA, 583 bp, Homo sapiens
gggaagggctcagcaccccgggcacaaagctaggaagggttaaacactttaagatgagaaaaattgatctctgtctgagctctgaagggtccgaagtgattttagctacatcaagtgatgaaaaacacccacctgaaaatatcattgatgggaatccagaaacgttttggaccaccacaggaatgtttccccaggaattcattatttgtttccacaaacatgtaaggattgaaaggcttgtaatccaaagttactttgtacagaccttgaagattgaaaaaagcacgtctaaagagccagttgattttgagcaatggattgaaaaagatttggtacacacagaggggcagcttcaaaatgaagaaattgtggcacatgatggctccgctacttacttgagattcattattgtatcagcctttgatcattttgcatctgtgcatagcgtttctgcagaaggaacagtagtctcaaatctttcctcataatgataacaaaatgctcttgcatgattttttaacaatatatttaaacaggaagttgtcactgatatactttattaaaaggatttttatcaatttgt

SEQ ID NO: 893 - protein, 144 aa, Homo sapiens; identical to SEQ ID NO: 891

SEQ ID NO: 894 - DNA, 556 bp, Homo sapiens
ctggaggcggggccaggcccagggcaggcgacccgagggccgagggtttggaactcgcagaggaatccagaaacgttttggaccaccacaggaatgtttccccaggaattcattatttgtttccacaaacatgtaaggattgaaaggcttgtaatccaaagttactttggcagaaggcatatatgtaaacttttggcaaaacactagtttttctttatagcatggaatccagttttattgctggggtgaaaggatggggattatgagtacagaccttgaagattgaaaaaagcacgtctaaagagccagttgattttgagcaatggattgaaaaagatttggtacacacagaggggcagcttcaaaatgaagaaattgtggtaagtgaatatactttatagaattaaaaattaacctgcacaatgtatttagactttaacctatctccatagtcatagttaataaatttcctcatgatattataggtttgtacctaaatcaaccggtagagaaagttattctcaataataatataagctaaatgtacattcataaa

SEQ ID NO: 895 - protein, 37 aa, Homo sapiens
MFPQEFIICFHKHVRIERLVIQSYFGRRHICKLLAKH

SEQ ID NO: 896 - DNA, 98638 bp, Mus musculus
  misc_feature (1)...(98638): n = A,T,C or G
gcagaagccagggtctgaagctggatgatctggctctggacaccaaggcaattgataagcacacactacatcacagagcaatgaaaacctgtttgagttcttatatggatgtgtgagtttcatggccaagagactcagccctcatggtcctgggtctatgtttggggtcaagacaatgccttctctacagaaatggactcaggatctgaccaggaattgccattggttgggtttccctgaccatccagaggattcccacctttatatgttatcaccatggtcagcattttgcacagagactacattttacacgattacccaggaagctatagatgaattagtggtcttttcagcttccactgagatctgaggaaagtcagaagtcaaggctgggatatctgaccttatcgggggacaagatattgaggcagaggtcagacctaggctagagagaagaatagcacaggaagtaacaacaacctaaccagaagactgtgaacatggagcaggatctgtgttccagaatcttctctctgaagatccatgaacttctggttcatgtgagacttctggtgcaaatgcatcactttgcctcggggagatgagctctgactctggatcatgaaggaggtagagacctgggtcaggagccaggtgggactagaaatggagcccagtggtcgagcacttgtgtgacaggtccccttcctggagtctgtcctcgatccccactcagtctgacctgtgctgctgtcttttcacgaataccatagtgtcctcttatctcctcttcactcagcttcaccgcattgcttttctttatggttttctgtgtgcatgctcagttcacagactcccccaccttagcccaagatagagagcaggaagaggggctcagtagatttttctgccagctggccttgtgatctctgtcagtttccgggatctttgaggttattaggaacacatgtggtgcacatacatacacacaggcaaaagcactcatgcacattaaatagatagatagatagatagatgatagatatagatagatagatagatagatagatagatagatagatagatagatagatagatagataggaatttggctgagatgaagacccaggtattacgccataggagcagttctgactctgaaccattcgagtgcacgctggacagagctatttctaatctcattaagacgtttccatctcttcaattctactggagcccaagatccctgatgaagagcccgccccccccccgccccccatatgcttagtaagaaggttaagggattctctagtctgctgcctcccgtccctgccttccaaagctggttaccaagtatggacaacagagggcagcattgagcttcacacagcggagccattgccttgtgctctcagacccattgcaaactgcacttccttcccctcttcagatcctccagctccaatccatagatgaggaaatcggttcttggaaggacagagaggaggatgcaggaacaagttaggcaatttgacgctgggttaaagttcgcaggttttaaggtagagggagtagaatttttgggaagatgaaattagctacaggaaagagagcaggggatgccaggtccaggggctgagtaaataggaagtactgtcatggggacagaccttcagggctggcttttctctagtctattgagctaatgcttttttctccttattcccagtccagcttcatccatgactttaatctctgtcccattacacagcaacaccgctgatctgagtgactgtgttccccagttcctctgtgggggcctccctgaggtcagtgttggggtgcacataggatcctctggaacaggacagcttctactcccttcccaatcttaacctggcagccaaggaggcttgatctgggcttgggtaggtcctgctttggctctgtcactgtgtgaccttgggcaggaagcccagttcctccaaacatctctaagagggcactaaagattctgccacggactctggaggttgcagacctatagaggtgaggagcaggtggaagggacttgggctccctaagctatgagtgtgtgaggcaggaggctacctgactaggtgtcagaatccagagttctcagggaaaagctggcctctcggtgggagtctgtgagacagcaacagggtgggtcattacctcagaagagtttaattcacaagcaagaaaagttcttggtgtgaagagatctatctctacagccgctgggcctgaggcctcgcacccacaccctttgagaaatagggttgccagagttcgagtttggtggactgctgataagaactattgcctcagttccagcctcagtttcccctttgacggcgtggggaagaggtccccgtgttcccagcccttgctttctcctggaaggcttcaccagtgcagacctgcctcgcccctgcagcctttcccttttccacccagagtcctgctccgcagacaggaccgcagagcgggcgtctgccctccggggggacctggacccgagggcccggtggtgcggactccgccaggcgggcccgatcgctcccgccgcgctgcagctcgctctgcgcacggccgccccgcctgccgcgcctccccgggcgcccgcattaaagcgcatatgcaagccatgaattatcaactgaaaggagtcaattaccggctctaaaaacgagtgtctgcgcccggagcgccccgggccatccgcctatttacggagcgatttcccccgccccgctggggaggaggccacgggaggggggggggagagttgaagccacggagcccgaggctgagggagagaggtctagagacaggagtgggagatgcggggggtgggggtgggggctgaggaaccttaaggagtgagggtcgggaagggagaaaaacagccccggccccttccatcttcaaagcagtgagtttgaagtggggtcctagggactttcaagccctgaatatctgtttaaggacccagccctggaaagggtggcctctagactagacctggagaggatgagcatcctctccaggaggttattccatccttgcaggaaagtgggggagcaggctgccgcattgtccatgaggagcaaccactggggaaaaggcaggaggtgtgaggaacagggacccagtgttggtggagtccaaagtgggggcgtttgcattgcccctcagcagtgacagaaaaaatagccaaaccaatcccactgtgccctggaagttctttgacctcctcacccactccaggtactctcctccggaagtgcttttcttgcctgcccgttgtttgtaccttcttctgtacatgcacctgcctccagtatagcactcactaactacatcctattccttaatccggacctgacttctctagcaggcaatgggcaccatcatggttgtctgtcttgctcagtactgcatttgccaagggagctctgtaaaacttttagcaggcaggcaggcagggagggagggagggagggagtgatggagggaggagtgaagtagccagaggggacttaggcctagatgtgaccaggacggcaaaatgcatagacccaaaacaggcctatgggattggactgcttcagacttgcacagtgtgtgcgggggtggggtggggggcgtgagtgggggttgggggtgagaggggctgaggacaggccagccctttctttgcagcaagggacaggggaagtgggagaggaagcaggaagcaagagacctgaggccttgtgcattagcccagcagtcactgccagaggcccttggctttgccctgagtgcttcagggcccctaacatcctagatttcctctgcaagcacagacagggagccctcagaaatttcccatagacctatctatgctccgagctgtgagcttgcaatcagcctttcttttctagggtgtgcctgtgaccaggcctctaaattcagagcttcaggtttcttattgagcacaggtgtggggacatcctctagttgtcacactttctcatcaagggcagccctgcccaggagcaagaatagctgccactcaggctttcaaggtgccaagcacccagcaatgggttgtggctcttaaaagtaactggaaatttctacgtcaagtcaatttgcaaatggtgacattcctaaagaggctgggattaccaagtgatagcatccagttttgaaactggcctgacaacagagactttagcccatgtccccgagtctcctggccctagtccatatacccacaagcccactaagtctttccagtcagctgagtctagattcccttcggtgaggagtgtagtgggggtggtgtcacaggaaagcaaggtagttctggtccagcagaggtggcccctggagtcctgttcctgctatcgcgtgggcctgtcgagtctctgtcgagtttgtagccccaccatgccattaccaggcagccagagggggtgtctgcacgcaccaacgctggggttcctgaggccgcttgcctattagttgctggtggcttcatggtgatttattggggcttcttcatttccccttggtccgctataaacatatttataccaccagagtgaccgataaatttcccttatgaatcccgttatctcccctattaaccatccgtcaccttttatgcggccacaatgggccaggccagggcactggggctgggtgggaggcctgcggcccacaacccctgagcccagtgaactcttcacctcccccactgctcatcaggcagggcagctgctgctatttctgaactgcctttaggatgaggacaggctggaccaggcttgaggagagatgaaggtgaccttgaaaggtggctttctctaggatctaaggatgggaagtcccttttagggttaacttgagtcttctactatggctctggctttgcctccttctaagcatacagcatcctcacaagctgtcgctgctttgcctgtttgcctcatccacagctctcagccttactcctagctgtaagcggagacacagtgtgatcggagggatccgatgccagctgtcatttgttgagcctcctctgtgccggtcactttatataaggatgccatgtgaccctcctcacggcctgaaggctaggcatttataatcccagtttctaggagagagtaaggaaaccaccctcagagacattcagcaaggagcctcggatcacctagaagagctgtgctttggggaaggctttctgtccctaactctggtgtttccagtctgtagacagcctcctcacaagccttggaagggacgaaggtgggaaggggggtgagggacgagactcggtggagggccagtgaaatgaaaagggcactgtagaattaggagtcacctccttttctttctagttgggtactacctgttaagtgaatcttggtttaaaaaccttcctgtggcagggaagagaatcaacagtatgtgagccaagcagtggccgagttgaggaggagaaaagaatgtatagtgttctgggcctcgggtgctccccagtgctccttagaggatcactgaagggtgcctaattatttctatgcctagtaacagtatcttgagtggtctggagatggctggggtagagggaattaggggtcttagtatcccaagaaacagattctctcctgacaagaggatgtaaggaagtcattttggctatacctttaactgtcatgatccatttgtactgtcttcctcacaatgatacctagtgggcacagaacccattctgggagaaaggagtcctgggttcagtttctactttgtccccaacccactgtggtgtctgaccctttcttggcctcaccccttagaaaagctctagttcagactccaggccccatgcttttctaccccgtggggattgtccctcctcagaccagaactcctgaagtgggcgggggaccggcagggacaagcaggccattgccaaccggtggctctcctgcagttgttagctgtgctagcagttgctgcttccccctctcctttctccttcccacaccgttccaccacctgtgtgtctgtctgactttgtgcatggccaggcattaaaccccaacaaggctgtcctcccttgaagaaagtcaggtcttgagcatacgtaaggcggcaatgtgcacatgccctccctcctcccttcccacccctcccccctcttgctctcccacactcacacacatacagtctccctcagtcattttcaatgtcataaatttccacgtctctcctccacacggctattacctgcgcctccgtcaccgggcagcgctctcgctcccagatgggctaggccatctccgctctgcaaatgactaagggagagagagaggcagggaaggagggagaggaaggaacagagagattgagagagaatgaaagaatgtgggtgagcagagccagactgagtagaaagggagggggaaggcctcagggagcagttggttccttggttccttttccctcctccaagaactgaggtcactgcgtgtggcctgggagctgcagtctggaggtggtgtcagttgccactctgccctctggtacagtgggcctcacacagctcttccccttcatgcccattcctctagggtgccagcttgcaggggtcggtgggaggtagggcgctgctgcttccgaggagagctagactgagagggataagagcaagacttttctcagcaacccagcaaggaggaaagaaagagagggtgaggaagggcccctgagagagctagagaggccaggctgaagagagtggtccccacaaaaggtccttcaaggctgccaagacctccaaggtactgctgagaaagccctaaggaaatacagtctactggtgctgtctcaagtgaggaccatgtgtgggacactgggatgtcaagaccctgcacctagagctgaccccatcacctcctgaaagacaccatgactacggctatcagtacttctcactgagtctccatcctagactgaccatggggtgggggtggaggtaggggtgggaggatgcaaccatggcctgctgtgttccttctctctctctttgagatgggtgtgtgtgtgggggggccctgttcttccttctgtccctcctccagctctgcctcccagcagggcttagactgtgtccctgctctcctctctccacagagatccatcatttccaattcaaaagtcactataactaaaagctgagcctggggctggcgagatggctcagtgggtaagagcactgactgctcttccgaaggtcctgagttcaaatcctagcaaccacatggtggctcacaaccactcataacgagatctgaagctctcttctggtatgtttgaagtcagctacagtgtacttatgtataataataaataaatcttaaaaaaaaaaaagctgatcttgaccatttccagtctccttttagaatttactatgtagcacagactggcctcaaattcatagcaataccttctaaatgctggaattacgacaagcgtgaagccccgcccccccaagaaaccttaagaaagtaaacatttttttcagcaataactgtgtaagttagcacatttaagtaacaagttattcaaattaagaattttacatatttctttaaaccttctgacaggggacagggagatagctcaaaggataaaagcacttgctttgcaaacatgagggctggagtttggattcccatcactcacataaaagccaggccagctacacacacacacacacacacacacacacacacacacacacagccataccttccaagagcaaaactgaaatagtttctggccctgttctcccttctgtccctcctctggctctgcctccctgcaggacttagactgtgtccaaggcctttgactcccactttcccctctccacaggaatacatcatctccagttcaaaagtcactataacgaagctgacctgaccatttcagccagtgacatgtcattcccttaatctttgccacagccatccaaatggttactttgtagcatttccctgctctgtcattatctgtttacttagccttttatttgtttagtatctgtctctttcaatggattataagtctatgacatctgagactgtgctttttccttcatcagagggtacctgccacaccaggagaccctggaagtatttgtaagccaggagcgatgacacatgtctgtaatcccttggaggatggggggggggggaatttgaggacagactagactacttagcaagaccctgtctcaaaacaaacaaaaaactagtatcactgagtagattggtgtataagtctgtccttgtttaatggagtctgatagatattatgctagggtgatggtctcaagctgggcatccctctgcagaaatctcagcatgatggatcccactcctacaaggaaaagcatatagctctgttgctgatgtctgagtctagcttgtgatgaatgcctatgatcacagaaaagtttgtctttgcccggatttccctcatctttgggtgaacataggcacgttctcccagatatacttttgcagagtcacatgagcagaaagtggtctaaggtgagccacaaccaagggcaaaatccattgtacataaaaataaacaccaaaaacacacagccttactcttgtttccgctcaggaaagacacaacctactggtgtgtttgtgatcagatacatacacacacatactcttccagatatatactttgtatatattcgtcaaaaccaatataaacacttaaatatcagtggaggagacacctgttcctttccttactagttcattccatagagtaatagcttgggttccgagttctcccctggcagtggaattcactacactgagtgctccatcacactctgccctgtacaaacacacacacacacacacacacacacacacacacacacacacacacccttctctatcaccctagttcctatcctcttgtgagacttccaagcttccacagagttactctggccagaggcatgtctcagctggaactaagatcagagcttagtctgtggacaaggtcaaggttcactaggtagatggggatgaggctcttgcaggtcaaaagtcattcaagggctgattttttaaaaaaatttttatttttattttatttttgatgttctgtctttctgttcacaaatctacctatccctatttgtatcatctcaagcagcggcaggtaggaccaagactcagggtccgcaacatgagcctctgcagcgaatggaaggtggggggggggcaggtgggggccgagcctgggcagatagctgtgaggtacgtttccatctctgcgggtcgggcaggcgaagccatttccaatctgctctctatcattttcaatatcattaatcccagacactctattttccatgcctgcgcagccaggcccccgagtgtgcgccgtgtaaagtgacacatattcatcaccggctcgtggcgccggcgccgacgctgatacaatattagtgttgcccccccccgcatggggcccgctccgcccggctccccgatggcacgaatccatcacctggagcccgtgtcactttccccagcagccacacttgtttgggcacttaggaggtaattgtggcacattagccagggtggggaagggtagggcgctgggactctgcaaaacggaagagaaggagacatcttcacatacgaccccaagccatcctgtcctggcccagcacctggctttggctaggctcctagaaacctgagttcttgctcagttctgcgtggaaagcatagaaatggacccagtgtttggggaggtaatgtctgggcctatcaggaagtcttagaggccaaggcttagaggtgattgatggcttcaaagtcttttatagccaacttgatcctgtcccagcactgaaacaggaatggcagcctcaatgcctctggctctgtgtggagcaggtgagtgaacccagctctgagggaaactctggctctggcctcagaggctggttccaagagtggaggctcttcctctaagagagattacagggttcagtcctcaggaaccctcagtgtgttatgtgcagtggatatcaccctgcctcatttttgttttgttttgttttgttttttcgagacagggtttctctgtgtagccctggctgtcctggaactcactttgtagaccaggctggccttgaactcagaaatccacctgcctctgcctcccaagtgctgggattaaaggcgtgtgccaccaccgcccggctcaccctgcctcattactagaagtgggtcagttcaggggtcttctgggaagactgcctggaggtggtgagctgcatgtaaggtagcctctgggtacagggagtctgagcacaggagagaagggaagagcagtagccagggccattgatctgagcagaggccagaccacgaaagggcatgggctctttttccctagtccgcagggataacacccattaacctcgtcagtagacaaattgcccgtcttgtcaaattcccatttaaaatgcaaactcgatttgacagggtaaactgaggggaggtgggatcggatggataatccagtggaggctcattatcagggcccaatgagaggggccttctggattgcctaacgaacctgccgtgatgaacctcgcagcctgttaatagcccatcccccactcgatactctgactagcctgccccacggcccacccctgcctgcccaaagtctgggggttcccagctgtccaccactacctctgagatggctgagatggtccatctgaaggctctgcaattgtagccgagaatctctctctctctctctctctctctctctctctctctctctctctctctctccctctctctctgtaacaaaccagcccttcccatgtctcactgggatcctgtacatggattacactactacacttggactatagttgtcttgtcagttagaattattaactcatttccaactgagaaaccagaggctcaggaggccatcttcccggaagcagagtgtcgcctctgggacatccatcagattccacgcgtcaggcttgccactgctgtcctctactctgctttgattgtgaatggatgtcctttcctcggcctccttcgtttcagtgctgtcactttctatgtgaggtcagggaaggtgacatctttttaagcctcatttgtcccatctggttttttctttcttttttatttttctttcttttcttcttctccctttttttttttttttttaagaagtgatcaacagctgagactttgagtaaagtttatggcttagtgagccgctccggtgctatttgcagatggtttaacctagggtgggcttgggaagagagcgaaggctgctttctgaggaagcagctactgaataggcccctcctgatttccaggaccaaggactccctgggctcatatgtcctcttgccttctacattccatgctcaggctactacaagaagaagctcatggtcactctccaggcctggggtggagctgacaggttgtccatcccagaggagcatcctggggaatgccagagggaggtactgccgactctgcaccgtttcctgccctctactataattggtcttttgtcaacgattcctaaatcatataatagatgagaaggagatgcagaagggcaactatgggtagctaatggtctgtggtttcaccttatctcccagggcatcatagctctgctcccagacaggtgcatatagagcctccagccaggctacatttgtccctgtggcaacacggggaattacttatgctgcctgaacaagcctggagctggcactcagtgaccttgggcagtgtcctctctgggtcttattggggcaccacttctcagttttagctcagtctctgacagtccttcccaggcaccaagccatggctctgtgctttccttttatgatttcttacttcccccaggggaggattcgaatctctcagctcgcattcaaggcccatctcaatttggcctcagtttatcttccatctttctcatgacaattttctgaactcccctgtctcatgcaccagccttgagttaccctcatatcttcatttggtactgtctctatattcagtagcccagaagagtacttcctttgacccactctgtccttccacacctagttttatcagtggtctggaaaggaccctagaccctttcttggtgggtatattgtgtgttggggggactaaaggggaaaagcagagagataaatggaatgcccagagtccctccagttgtcagcccagccatcctctgaggctggcctaattcccttcagagcccagctcccatcttcagggtggtgctttgggagctgagagcccaacgctaatgcctaagaaaagtcgtggatggattagaaagctagggggattagggccagagctggtggctgatgcaggagctgagccccctcctcctgaggaagaggaggctaatcctgcttagcgactgaggagaaggagctgcagagctgggggagccttcttcatccactgaagctgccagccccagcaggcaaagaagaagaagaagaagaaagatcaccaaccctgtctgcccatcaccctttgttaccctgaaaacttttcaacctcctgtatccacccccactgccttgtccagctacatccccaactattttaagtgtttttgaaattgtgtcacacacacacacacacacacacacacacacacacacacacacacacacacacactgtcaggtcatgcctgtaatgagggtgtcagttcccctggagctggagccacaggcagttgtgagcctctggtcaagtgagtttgaaatcaaagcataagagtagtaagtgtttttaaccactgggctttttctctacctccatcctctaacttttgtagctacctatttcttcatgcactgagctatctgctatgtcccattcgtctatccatgctgctcactgtgtctgttataggtggccttgggagctgttaggtttattcattcctgcaactcctgggactgtttgctgctgaccacatttgagttcctcctctggatttgccctcagctgctcccccaagaccatactctcctcaggtaagtctatagatcatgaggtgatgcaagaataggattacatggccccccaccttcaatctggagcaatgctgaaatgccacattagattgggctgtggagttgactgagtccctagaaccattgtatcatactggacctcttcctcaatactgctgcttctgccagtacttccctagagccttctctgtaaatttcctacacacacacacacacacacacacacacacacacaccctctcaagaaaatctcacccttcactttattcttcaaatcctacattggagaggatggacacagattaggctgcccgtgagaagcctggtttcagaagcccccagcctagatgctaggagggtaggtgtggatcaacagcccttcgatgggcactaatcctctggactcctttcagtataccccactgagtggagagagccacctgtactaaagctagggctaaggctctgttatagagacccagactgagatcctggcccgaagaagccctgggggaactgattgaagaccacgaagggctatccccatctgagggtttgatatggggtgaaaggagctcgtcctgggagtctggtctgaatggaaaagggaactgtggtttacgaatcagggctgagtaggagaaatgatactacacagggttggtctctggaccagaagaggacaggggcaaggaactgggtggattgacctctgagaggcagtttgggatgtgggggttagtggagggggacactcatactctgctccttacctttgatggacaaatgctaatgacattaccagcaattgaccagaaacaaataaataattcagtctggcctgaaaatgggagaaaagtacttaaatgctattgacaagtcagtccctggcctcattacccatgcagactcaggcctccacatcgaccatgcccccagattccttccaaccccaccgtgggcagcctcaggctccctcccacctcctggcttaggttggtcttgagaagagagtgacccaaggcaaccaggtggagagctaggctcaaggtagttacctaaattccttcccctctcttaactcacagctgtctctgttagttggaatgttatctctggttccagccctgcccaggtacacactcaggagtgggcgggggcgggggcggggacagggacagggacagatatatgttcatatgtacacatgcagaaggggacccacagctgatgtatctatcctctttcaggacacaggaagagtagtgaccccctggggcggctgtcagtcactgtgctgtcaggggaatacaaactcattaaatgtttccttgcctgtcacaggggtcctcagtccccaagtcaggcccgaggaggaggaagaggaaaaacaacgtgcagctgatcctctaaatgcacacccagaatgtctggctctggacgactgaggatctgaaggctgtgggctcctggacagctggcattttgggcattacagcacatagctgctcctcctgaagctgcaactctgcaaaaaagatgtcattttcttcaggacattgtgtttctgccccacttgtcctctaggccatctctcttggcatcatctgacctctttaaggaaactggggaagccacttttcttgtggcctcatccctcctggagcatattataccagagccccagtgcttcttgtaaagtggacagtcagaagccagcaacatctactggtcggattgggaccttcaggggcttccccacccagtgtctgggtctcaggcaaggattcaatccaggagaatctggaatggaggtctgggacctgagcctgggaggtggacaatgtttctcatgtacaacctggggcaggaaatggttctaaaagacagctatcctcttgtgtgccatataaccctctgtgtgtatgtttggggggggggagagtagagattaggtaaccctcagtacccacctatctctggtaccatgcttagctctctactaagtgagacctgataagactactcctggtggagaccagaacacccaccgtcagtatgcaggattttggtgtgtgctagggtgtggctccagcccatgcctccctcctgccctcctctctgacactagaggaatctcacctccaccgggacatggccccagtgcttccttaagctagccatttcttaccacttgtgctgccccacagagctccaggggcatctcagagcccccagcctggcttctggactggggtgagaaaaatcctccctgctgctcgccattcataacgctccctctgctcatgtttcttccaccaatgtgtccaatgtgtcccacggggagtcatttatccggatcgactggctctcctccgtgcaaacattcgtagagcattaacaagcctaaaacccaattagccttcaattactcaagccttagccagattttctgtggtagggacaaggctaaggaatgtatctggcactgcttgggtaaaagccttccactcctttgagccaatctgctcatcttaactgccagccctgtcctagccagactgcagccccctagtccccctccggcccaatgcaagcactctgcctcaaacctctcattactctttaaaaatccatttcataaatatacatagccaaaactgatttgagaagactcaagaaaacaatgcaaaataatgcagaatgaaaaactgaccaccatgcacttcctgttccctaaatcctacttcgagtaacttaggggttcttatttcctccccatgtttgaacctattatgcacatacccatatagttttcttccttccttccttccttccttccttctttccttccttcctgccctttcctccctccctccccccctctctttctttctttttacattttattnnnnnnnnnnnnnnnnnnnnacacacacacacacacacacacacacacacacacacacacacacacgctgtggcccgagtgtgtaggccagaggacaactttcgggaattggttctctctttccatcatgcaggttccaggagttgaactcagttcgccagtcttagtagcaattgactttacttgctgaaccgtctctctgctcccattttaaacattttatttgagtggcttcttccttcccctcctcctcttgttccttttcttcttcttcttcttcttcttcttcttcttcttcttcttcttcttcttcttcttcttcttcttcttcttcttcttcttcttcttcttcttcttcttcttcttctttttcttcttcttcttcttcttcttctccccctcctcctccttctcctcctcctccttcttctgttttgaaacaagtcctccctgaatggctttggagggcttggaactcactacatagacccagctggcctcagactcacagagatccacctgcctgtgcccaccaagtactgggattaaaagtatgcaccaccatacccagtttaacattttaatgttaaggccatactattaatattgcttaatgacttcataactataatgttgctattgttgtgaatcatgatgtaagtgtgcccgtagtgtagtctctgtccaacactgttttgaattatttctttcattccttacatgccttccttcccttccaccccccacccccatccctgaaatacatcactctactttcacatcctcttcagctactctccgtcctagccttcttcttcccatccacctcctcctccatcttctcattcttccctctctacaacccttccccctcctccctgggtactgtagccttgggggaggggcacagccaaagcagctattagctttgcaccccctaataccctgagtctcactgcctcttaacacctccccacctccccagcctgggcctctaagccccatctccctctagtcttcctctaatcactaaggcttatttctgattttctgaagtgacaaggagctgggtttgggggaggagggctgtcagcaagcatcttctaggattgagggagagaaggatgccgagagggaggtctggtctgcagcagcagagaccagctagctgaacaggtggctcaatgttcacatcccttttgtttatcttactgtgtgcctttagcagtggttctcagccttcctaatgctgcaaccctttaatttggttcttcatgttgtggtggttttcattgctacttcataactataatgttgctattgttgtgaatcatgatgtaagtgtgcccgttttccaaaggtcttaggaaaccccctgtgagaaagggagggaccccctgtggggtcgcgacccacgggttgagaactcatgttttagcgtgttctttcaagctagattctactttctctgccttcctctgtaaaaaggaaagtgactcacccacttcattcactttctgtgtccagagcctgtctacaccaccctctcatcctgtcctcactggcaccctgcccaggaagatggcccaacctccctgcccctttgattctaggagtaggaaaggcttctggtcttcccaccctatagaaatctcagttttcctccactgtctcaaatgcattcctccccaaatgcagaggactggtggagatttaaggacagcagcaaatctctttcagttttagagatacctaagatttaaaatccgtgcttagagtagaggtctggagagaggagggctgaggaggtggtacaccggagcccctgatgcagtcctgtttgagtgaccttggatgctcccttaggctctctctgaacctcgggttttctcctcagctctctggaagttttaagaggcccagcaggagtacctggctcttgcctggaagtgttcaccctgtgctaatttaattacacggcctgactgggcccaggctggggaagaggtttaatggcagctccggagacagtgagtaatcaagaattaattaagcgtttctggggatagcaagtctgagtgaggtagggattcctgggagcctggctgaggctccatggaggttacagctttccctttggtccacttctgcctgcgtaggaatggttgagagccggccatagttccaggaaggctctgcgtttagggccacccactaggcagtctctggccagcaggaagcagaacactggcataagatggtggggttgtgtgaagttgggcaggaatcattggctctggtcattgctatagggttcagattgtgtagattttgaggctgatttacatcgagaaatggaaagatcaagcagccgcaagtttcagtctcagtttaactatatacaatacaaataaggtgtttttagaccagagtctttccatccaccttgattcaggttagtcccttagattctctcagcattagcttctcccagccatcacgattctgctaacacactttttaaggagccctcttcctccacccaggccatggagaatttacttttcttctcatttgtttcacgtttcttacgtgaacccctgcctccaccaaatcaagttccacggagactgaaacagctggctcacagcggtgtcttcagaacttgaagtaggagtagggtagatggtctctttgcttgtctggaaaatggggagaatatgggtttgaaggtgtcatgcatgtaactgaaggagccgggaaggctcctggtcaaacttgcccgcaccactatggccacaagacttgctcactgccgaccactagcgtcttagcctcaacctcggggcgcagcgactgcgccaagcccggagccccgagccccgcccgccgcgggccaggctccttcccaggcgcccccgcgccgccggcgctttgaagtcccaatccggcaaatagagtcaatcaattatgaagggaacaatctggcggcccctcggggagcggcggccgagcgatcccgggggattaggccgcaaatcgcgctgagcctccctaagtgacagcgagagaatcgcgcgcggcggcggcggcggtggcgggagcgggagggagcgcggccgctaacccgattatgcagatccgcagggggcgcggattaggcctcgggggcggctcgccctaagcggctagaggatttaggaaaagtttactcgggcggagggggcggagacgagccggccgactgggtgagctcagacccgcggggctggggagaagcaagccccaccgcagccgcgttcttccgggcacacccgggcacacgcgcaaccctcgggcgggcagtctccacgcgcacacaaacccgcagacgcgcgctctggctcagccgccagcccagctgccaaaacactcgtgagcacacacccagcgttgacatctcacacagccaagcccacccaccgtggctcacactcaccctgtgctggcttatggtctggtgaaaactcacaatcacagatacgattcagatgttgagcctccaaggaaaagccagcagagacccacagtgacacacttggtcctacacctgccttgtgtttcccatagatctttcctggaggaccatgtggaaaagggacagagaacccagctccaagtgagctgaaaccaggcatttccaaaagctgtaaagctgtcagtgtggcttatacgcatgctgacactcagtgtatatccacatatgtctatggtagcaatgtttttggatagtgttgtttgtgggcagtggtatgtgtatcttatagctccacagctccacaatcgtcacaatcacaaacaaagtctgtggacgcacactgaccatacagagacacccatcttagacacttcatgcacacaccaaactcctgagaaagtcagcatggacagacagcggacacaagcgctgccagtgcggcagtgtggcacagaagacactcccttccacccctcaggcagcagtgagtgccttttggctgacttggattgatatagagagaggggtcggggtcaatgagtctttagcaagcagagttctggttccagtttcccacagtgtgtacatcatagccacctttgttgttatgggaagtgtgtgtgtctgtgtgtgtgtgtgtgtgatccctagcatctgatctggctggccattgggtgtggtcagtagggataaatgatgcacgctggctgtcagggtgaaattattttgagtatctctggttaccatggtgatagtggtgggacttttctttcccagtgtaaccataggctgtttgtttgtttgttttttgcctcaagctttctggatcagcgttcctgggaggccaagctggaacattcagactgtagagagggaaaatgacatagattacttttctcccagcctcttcacccaccagacaggactagccaggaagttctgcccacaagtccacaaatcaatcaaacttcctggctccactaagcattgtggcacatacctttaatcccagcacttgggagacagaggcaggcagatctcggagttcaaggccagcctggtctacagagtgagttccaggacagtcagggttacacagagaaactgtcttgaaaacaaaacaagggggctggagagatggctcgaggttaagagcactgactgttcttccagatggtcctgagttcaattcccagcaactacttggcggctcacaaccatctgtaataggatataatgccctcttctggcacacaggtgtacatgaagctagagcactcatatgtataataaataaatcttaaaaaggaaaaaaagaaagccaggcgtggtggtgcatacctttaatcccagcactcaggaggcagaggcaggcggatttctgagttcgaggccagcctagtctcatgagttccgggacagccagggatatacagagaaaccctgtcttaaaaaaaaaaaaaaaaaaaaaaaaaaaaaaaaaggaaaaaacaaagcaaacaagatttgatgccacatccaggaaggattcctctgggcactatgggcactaataagcctggaaagatagcttcagagagtgcttggttataatcagtgaccaggccatggggaaaagcccactcaaatggatgccttgcctcagaggctttcacgggggggggggggatccttctagcttgtgttgggggaggaaagagagtaggacaaggccctgttttatatacccagtgtctgtggaaccttggcaacatcttcatagttcctgtctgagctgtacacctcctcctctgagccttgcctggtctgaatcctgtcacactatctaatgaatatgtcctctcttagccacggctcacctctggctacatgtttaaacttgggataatacaataccttcctcctgagatcagtagagaggagccacacagtgtgtgagagagggttgcatagtaggtagttaatctgtggatctttcatttatttatttttgatctgattttttgagacagagtttctctatggagttctggaactctctatgccagtggttcttaacctgtgggtggcaaccccttggcgttggtatatcagatatcctgcatatccgatatttacattatgattcagattcataacagtagcaaaattacagttatgaggtagcaacaaaatgattttatggtgggtggggtcaccacaacatgaggcactatattaaagggtcacagacttaggaagattgagaaccataggccatgctggccttgaatgtcacagagattctctttgctctgtctcccgagtgctgggatgaagggcatgcatcctcatgcccaatgtgaggctttctattattgttattattatttgtagctcagagtatgcatgctgcagaaggaaagaatcctataaccagtcagatcttaataaaggttgctacaatgtactcttgcccattcaggcttctcacagaaggaatggacattcagactgactgtccctgccctgtctctggcatcgtgcaggcaggtgggtgggcaggagaggctggatccaaagtggctcagttggttcccagcggaagccattaccttcctggagagagaaacccactgtccatctgaggctgggggcaagggtaaggagtacagattggagtgggatccaggtctgcccccaggcctccttcccttacaccttctcctgtgcccaggtgaagaagctaagactctgtccagctccagtttgggtgaatgttccctcttggatctaggggtggggcaggtgatacagcaaagatagagagggattcctgctcacagcaccaactaattgattgcgcctactgtgtgttgggccccaagcttcctctgtttactctgtaccctagacacagctggaagccagcagggaccttttcaaaaaagccatccagttatctagcctggggcttaacttggcaatggaaatgagaggagtgtcacatgaagagggggaagggaggaggatggggagggggcaggcttgagacttgcatgatggctttgtagagcaagcttgctattgtatgaagattgccagcttatttggggcaagaggattgctggtgattgagatgaaggctacagacttactcttccccttcccccccaaaaaactatgctttgatactacgtctgcatttaaaatcaggcaaagcccttgactgccagatatcaggcatagaacctgcctgaactccagacgctttcctttctttcctttcattaaggcgtggtctcactaagtaactctggctggcctggaactcactatgtagtgcaggctggccttgaacaggcaaatgccaccacaacacatctgcccctcccacccgtgtatgtgtgtgtgtgtgtgtgtgtttcttcttcctcctcctcctcctcctcctctttcttcttcttgttcttcttcttcctcttcttcttcttcttcttcctcttctccttcctcctcctcttctcttcttccttctccccctccccacctcctcttatctttcttctcctttcactttttgagatagagtcttactctgtaacccaagatgatctagaactcactatgtagctcaggctaacctccagttcatggcattccttctatgtacccttctgagtgctgggatcacagacatgagccactacatgcagtgttctctctctctctctctctctctctctctctctctctctgtgtgtgtgtgtgtgtgtgtgtgtgtgtgttctttttatgtaactcagatctctactgcctttcatctttctctattcctgagtggtgtaggtggatcataagaagctctgaagccaggtgtatggtgcacgtctttaatcccagcactgggaggcagaggcagacggtgaatctgaggccatcgtagtctacatagtgagttccaggccaggcagggttacatagggagaccctgtctcaataataataataataataataataataataataataataataataagtgagctgaatgaagcacaaaagccaacagagggcctctacacacccaggactcagaaaaggccagcttcccctttctgttcagttcctgagcactctgtctgtacccaacacagagcctggctctggaaatgatgaacaggctctacagatcataatgagacctgaatgtggggcttgactctgaaaataagaacagccttagtaacatctcggactctgaaaatggtaacacactctgcaaattatcagcatctgacagactcaagaatcagcaacgagctgtgctctgtggatggccattggctctgcaaacacttacaagctttgcatatgatttcaggctctgcaaacaatgtcaggctctgtaagcagtgatgggccttcgaaataagaacaggctgtgaacagtgatgggctttgtaaaccgggatggaaagttgtgatgagctctaaaaagacatggtcttacctgttgaggaagagaagaacccatgggatccctacgagaaaagctgtgacttagtgtgttggccagtaaggtcctcctctcttcctttccaggtcctactataggccctctgtccatttaccgactggagttggggatctgggtggagtgggaaaagaaagcatggtgctgtgttgccactcccaaggcttggagaagacgaaacttccaagtagtcaaataggagcttgtgtctgtgatgacaaatttgttctcagcccagctatttgcaaggtggaaagtgtctttctacaccagaagctctcagaatgctaaaagggtgtttaaccccattctagggcctctaggggagccacagggtcagctttacaaagcacatctttcttacaggctccaacccaccttaaattctggctggcacctaaatatcttggtagcaatttaaattcctgtctattcttcctaggtctgatcagtgttagtggggaatacgtccatctcgcagagcacaggatctggggggatgggtagaagcaagcctctggtcttggtgggctgtgagtagcagtgctgaggagctagtacaggaggctgggaggaaggtgatgatgatcagccatggaggtggaggtagccagtggggaggagggtatgctagtgtgattgtggagaaattagggaagcaagtggtggcaacagtcaaaagatggccatgcttgccatgtctaaggtggcaagagatagcttggtgtatttggcaagagtacaccctgggcccaacttctgggaatggcatttgctagctgtgtgacactaggtgatttatttcagctttccgtgccttagtttcttcatctacaatataaagataagaatagtgcctgttccacagagttaccgtgaggattaagtcagttaacccctgtaaatccttaaaatagttcttggcctactgtgtgacagcactgggaggaagaagcaggcagatctctgagtttaagaccagcctggtttgtataatgagttccagatcagctagggctatctcagttgtcctcttcttataaaaagaaaatatttaattgctaggtctggttcacattggaataattcaagctacttagaaggctgagacagaggttaacaagttcaaggcctgcctggggcttggatatatagtaaattaaaacttaatatggttggtaccctaatgagaatttgtttcaaaacaaaacggggtggggagcatggctcaggggacaaattgcttgcagaacaagtgtgaggacttgagtttagatgcccagtattcacgtaaagtaaaaccagacaggcccggtagctgggcaaataagcccagtgctagaaggcagacacaggagtcttctggggtctagtcagttggtgagttccacgttcagtgagagatcctcaaagcgtacacaggagagtgataaaagaagatattagatgtctttctatggctttcataagagcatattacataaaagacagatgtacgtagaagtatacaacacacacacacacacatgcacacatgcacacatgcacaaatgcacaaatgcacaagcactagctatgttgcaaggtctgaatttaatcccaattactacaaaaaaaaaaaaaagaaagaaagaaagaaagaaagagaaaaagaaaaaagaaaaaaaacaaacaacagcacagaaaagaaagcttgggcaccatgtgccctgcagtgctctaagcagctcacaggtggtgacttgtttaattactaagccccttacagtagctaataccatatccatgctaaaggtgatgatgctacaggctcagaagataatacagctaggaaccataggaactctcagggctaagatcttcatcagacatcagatggtgatgatagtgatgatagaactggctggctgggtagagcaatggtgagcactgtgtacaagcagaaacagggttgggttgcagggatcagggatgcccatgagggtggcttgggtggcggtcggtggcattaaaggaggaggtgaaggtgatggtggtatgcaaggcataagaacaacattcactgtcacctataatcccagcacctgggaggctgagccaggagtattttgagtttgaggccaggttgggttgcctagtgaaactctggggaaagaaaaaaaagaaaggaaaggaaaggaaagaaaggaaaggaaaggaaaggaaaggaaaggaaaggaaaggaaaggaaaggaaaggaaaggaaaaggaaaggaaaagaaaagaaaagaaaagaaatgaaaaaaaaaaaaaaagaaaaaaacccaaaaccctgaaaaacacgtagtggctgagctcagctttttggttggaggatcacactcttccaggttttttaggcctctgggaggactgattttcagtaagactgaagtcaaggagggagcaaaaatatcttgttctattgatcaactaggatctttgggtcccgggtagtgaaaagacagagggaggcagacagtgctgcaggggcagctggagcttgccttgcccggtttcttcctgcttctcctggcctttgtcactctctaagcccagtatgtctgctcctaagagtggtccccactaacggtgcagacaatgccataggtaagccacccatcccattatggaactctgctggccttgtctgcccagcgcaggcctgcctgcttctttctggctgctgcactgagcagcagtcttaatagagaatccgcctctgcgctgcggctccccgcccgcccgcccatccctattatcggcaccatcaacggcggcaaatgacactctcggaatcttgactccaatctgatgcctggtccccggggccgaggagaggcgcaggccagctaggctggggggccggggagggggtgtgcagtaataggatgtggccgaggatagtctattagcattgctggaaatgttgatgagccccctttctggccccttggcgtcccatcctcgctcagccagacactgaggaggccttggtgggggtggggggaatagtttgtggggctggggctggggtccagaatatcaagctcccttggggaccatggaccttagaggaaggtcaagaaaatagtttatttagccttttagccttctgaccactgatctgggaggaagagggagtggggtcctttctagcagggagcacgtgatttttccatttccaaaacaatgggtcctggggcttcaggtctggaaggagccccaaggagcagtcctcccacccactctcccttttccggcctcttgaaagtaagctgttcagttcctccctgggatgcttgctaagtgtttcctctttgggagttctgattggcttttctcagtatcagcatcctgagatgcctagaggtcacctacccacaagacagcttccctgggtttggagaggaagttaggtctcaagcctgttttcctgggctacctcagttcctcatggctgcagatctgttggcctgtgtgtaatgtgtttatggaagggtagtaaaaggctgagcccaaccacaaggtacagaagaggcaggggagatagtgggtagaaccccggatgcatgaatgcagaatagtcggattctaacccagtccagttgctttgagaccctaggagagctacacactgtcatcctaagtgcttctccttgccctgccctctcttcaactgtcctttttaggatgatgagctaggagaggtggcacacacccatatcccagtacctgggttagaaccaccaggagttcaaggtcattatcagctacatagtgagttcaaggccagcccaggctccatgagcccttgtcaaacaaacaaacaaacaagcaaacaaacaaacaaaactggaccccaaatttgaagagaaaacgaagcccctcaggagactgaggagttctaatagctcattgctttgggaagccatgcatttggggctcgatgatatacaatagagtcaagttaacacctctcttctgtccatgaaaacagcttgaaggggatgggagaaaatgaagcaaaatgtagaatgtggtactgggcctggctctatgggacaggcaaatgggtgagagggtagaaggcctatcctgtctggctctgtcctatcctgaagggtgtctgacaagttggaagccagagcacctaggccagcaagactgaacttcttaaagcccagctttgccagaagaagaagaggttgggactagctgatccaggaaggggaagaaagagccatagccagctctcccctcccccaagcctgggcttctaagcatcacgccgaactcaatctgttctgcccactgcttccaccatgccccagagtccagaggccacagtcggtcaagctgtttgcctctgctgagtggctgccctcggtgcccccagcaggggcctggccatcagtcacagggctggcagtcctcagggctggacatagagccttatgggcagggatagatgtagactgtgggtagaaggcagcagggggcacggtctcctgggcccccttggtggcctctgttccctttgcagcccccctgcccctgcttctttcttcctctcttcacttgtgcccgcccatcttgcctttccccacctcccagcacctgccagcctcacctgtctggttcagcacgctcttctctctgtgtcccttcttccttctttcattagactctcttctctttgcttccaattccacagtctatgggtcacattgacccaggtttagtgtttgcttgtcttgagacatggtttatttatgtagtcctggctgtcctggagcttgatatgtagaccagaatgccctttgaactcacagagatccacctgcctctggatcccaagtgctgggattaaagctgtacgccaccttgccttgtcgtccactcttgcttttagtttgtgaggcctctattcagcctgaccatctctgtctcccagctaactatagaggattatgacccggtgatataagggttttttttgatccagcctaggacttccagggcagaggaagaagccttgcactctggaggatgcagagaaaacttggctgggcacgtcgggaagaatgcatttctgaaaatctgacagcagggggcgctgaatccctggtacttctcgtttgtctctagtctcaggagctgtatctacccaaggagtgtgctgtaaggaaacctagagtgtcctcaccaggggtgggcttgtcctggtctgatgctgccttaggttgttaggttttaaaagaaaccttcacacgctccctaagtcttttgttcatttgttttgattcaagggtttatgtggcccacattagccttgaactcctgatcctcctgcttccatctcttctgaattctggattatagacatgttctactatgccataccatgcaatttatttacctgtatcctgcaaacactaataacccaggggctttggattctccaagcaagtggtactggttccctggagagtatcatttacacttacctcagtcctaagggaggttagccatttggggagaggtaggtagtagagacctccaccacaaccccctgagaatcagtccttcctgctctctacaggcagtgttgtgggcctaaagaattctcatatccatgtcagcttaaggaggaagcaagtcttaaggcaaaccatatccaaaatgatccttacagatttcttgccaggtgcacagaggagaaggacaggcctgggaggggagggacttatctctgtgacagtttgacagtgggtgtattcataaattgtatgtgtattatgtgcccgggggtgggggtagggatgggagagaaagcacctaaatttggggtgagttcaaagtgactaggtgacatggattccaagaaggggaagcaggctctaggcctgtagtgccactgtcttgatcctcagatcatgaagggtcaccttcacagttctcaggaaggaagacaggaacctccaaagcttttaagtatggcattattattactgttctgtgatggggtagcaggcaggcccagcaaaggcctctggaaacagaaggtggcaggggagacttcctgaaggggttagattgataaagaaggggcttccgatagctctgtgatctggggcaggcaagaaagatggccagcctcagtcatttcaggacataccaacacctttctaggcctcccaggatgctgggaactggagttgagtcccccacccttcaccctaagctgaccatgggaggttagtaaatattgtaatcagattagtgagtagaggaggcagagatgatggtgagaaaatactctgggctgggttagcccctagttctctcctgggaatccaaccttctgaacttgcccaacccttctcctgtggccctaaggccaccctggctccttagcaccctctgttgacctgagtaacttcctggcacctggacttctctgagctctgtggagatttctatatcctgggtttcccagcctagggagctctggtgaccctagttcctcggggtgtcccctccccttcttctggccactgtgttgcttacccatgagattccaggatggtcctgtgcagcggagtgcttgctggagggaaactgcggctcctcggcatgagctgatcgctttcctcttctgccttctccgtggctgagctgggatcaggatagaggcacagggaagggaagcttgagtggatggatgggtgaggcagacccatccagtgaaacactgggccaccaggtcctcccgggagaggaagaaccaggaaaatagggattagtgttctatgaagctggatgtggggggaacttggtgatggaacccagaaggattgaggcagagttggggctgggaattaggagaggtagaggtggggtacctgagggcttgggaatctgggggtgggagtgagaaaagggaggctgaaggatgggagacaagagggtttgagttgaggctgtggaggaaagagctattgggaggtgtaggatttagagcatcaggaaacttaggggctggacgttaagaactgggatgttaggaggtggatatagcatcttaacaagaagaggttgaaatgttttggggatgagggactaaagtagcagagcaactgaactggaagaaaagcagtaaagacacagattgctttgggcagagggctgtccagggagcatgagagtgcagggcagtcccaggccaggcccccttcaggcccttgtgtctgctgaggccattgggggcaggcagtggtctctccttgttgggctgtcagagcgggttaggcttgggggaattggttctctggatcatctcctgggagccagcccctcctggcagctttgtttggcaaaagcgcaaggattagcagggctgcccccacaccacgtctcagcccctcagccccgtcagttcctggtgctttcatccccaaaggttgctaaagctgcagtgctttgagattagacccccacaaaggggcccctcatgcttcagccaagccttgggggcaggaagaggggggggtcccaagatctcagtggaaggccaaaccctggagacaaatcctcccccttcctggaacatccagagggtcctcaagccaaagggaaaaggccatccctgtttgacttcaactgagcctcttggaggagcatcgcagggagagcattaggcctccacctgtccacctgtagtcacctccagggccagctgggagctgaggtagggcagagagtgctagggagcagagcagaggctggagcagatttagaacatggatggagcctgttcactgcgcagtcagggagactggcctggcaagcggggcctgtcctgggtctgacagagctgaggcaggaatgcggagggtctcactgttcactaggtgtctgaggccaaggtcaacaggagccctggacaaaacgaagtgggtctgtgcagaagagtggatttcatgggacaatcaaagggtgggttgcagaaaagcctaacagttattattattgcccatgtaaaggcaaaagggaaaactaccaactgccttaagtaccattccataaaggaaaaggctatcttaacatacgtaataggaaagatataatcccagaatagagatgcttcagttaatgtaccttcataaaaatttcctacaaattttcttatagtttattggtatttgggtgacatgtcttgggacttccagagacagtgacttttaagaaggtgtctgtttcaaggggttgagccccctaggtttgtgcacttaccgaacctctgcccacccctctctgtagcagtaagtgggtggcgcagctgtttgaggtgtggcgctgggaattcaggggaggctgctgctagttgggggctctgctcagatggtgacactcctagccttggctttcccattgccaaggagacttaagaggagggggagggagtgggcctgactgtgggtcgatagagggaaatttcttcctgtctccttgctcataaaatgtttgtggtgaacatattgcagaacattcccagagaggccacaaaaggcagtgctggactggcagggtcaaatggagcacgtggagcctggtctatctaatcacagcacagctgggtcacctgccagggctagtgataagaaggggctcagggtagttgaggtggtggtggtggttatatgagatcagcaggagacacatcagaggtgcctaataaatcccttgcgagaaagtgaccctatgagcagaatgcccatgaggggtaaaggctgatagaaatctaatgtatatgattacactatagctgtcttcagacacaccagaagaggccatcagatcccattacagatggttgtgagccaccatgtggttgctggggattgaactcaggacctctcattttataaataagaaaacataagcacagaggttaagcaacttgcctgtggtcatacagctagtaagagcagaccccagatttgcacccaggtgggctggctctggtgtcccagctctatttactatggatgccttaccaagagcctacacacaggtttcttgagttgccactgttccctgaccatgtctgaccactacagggcagctccattgttttctaggaagcatcaagaggtacttaccatcttgtaggcactagacagaacagaggtgtagtctgatctcaaagtggtagctttagaaaaatcgtgttcatgaaaccttttctgttcttatctagtagttgaaattttgtgaatttcatatgcattcagtgagcacactgtatttacataatttccactcatctctctctcacctccaactcttcccatctcccatcctggtcccttctattcttctgtttttattacacacacacacacacacacacacacctctacttagtccatcccatgctggctggcatatgtacatgtgtttgtttaagacagagcacttggaattggataattttaccaggggatttgttcctggagattccccttcccttagcagccattgactatccgaatttaatcatctagggatgggtctcatagactttctcccattccatatccataagttctgtaacataatttcctttgagaggtagagcttaatttctttctcccatgtatgggatagacttaattatttgcttataaggaatagaaagggatggaatgtcactataacattttcaaaattacactgtatgtattcaaaattacatggtgtgtatgtgtgtgtgtacacttgtgtggcatggtatgtatatgtgtgtacacttgtgtggcatggtgtgtatgtgtgtgtgtgcacacttgtgtggcatggtgtgtatgtgtgtgtgtgtacacttatgtggcatggtgtgtgtacacttgtgtggcatggtgtgtgtgtgtatacacttgtgtggcatggtgtgtatgtgtgtgtgtacacttgtgtggcatggtgtgtatatgtgtgtgtgtgtacacttgtgtggcatggtgtatgtgtgtgtaagtcagaggacaacttaacaggaactggttcgctccttctaccacatcatttagttaccacatggggtccagggaccaagctcaggaggtcaagcttagctacaagcaccacctttgcactgaaccttccctttgcactgaaccttctcgcagtttttaaaaaatatttatttatttattatatgtaagtacactgtagctgtcttcagatactccagaagagggcattacagatggttgtgagccaccatgtggttgctgggatttgaactcaggaccttcggaggagcagtcagtgctcttaaccactgagccatctctatagccccttgagagcaatttattaaagattcacattctttttttttaaagatttgtttattattacacataaatacactgtagctgtcttcagacaccccagaagagggcgtcagatctcattacaggtggttgtgagccaccgtgtggttgctgggatttgaactcaggaccttcggaagagtagtcagtcctcttaaccactgagccatctcgccagccccaaagattcacattcttttgatctctctatctctacctctttttgttttttgttttttgttttgtttgtttgtttgtttttgttttttgagacagggtttctctgtatagccctggctgtcctgaaactcactttgtagatcaggctggcctcgaactcagaaatccactgagttctctatctgtctctatctctttatctcatccttctccatctctacctctttctatctctgcctctatctctttctgtctctgtctctgtctctatctctttctgtccctgtccctgtcccaaccctatccctatccctatccctatccctatccctatccctatccctatccctatccctatccctatccctatccctatccgtatctctatctcatcctgctagatagaccccttggaagacaactgagtatttggcagtcagcaccagccaatagccatagctctacaaatgagccttcctggaagaggactctcctaccccagtggagattaggacaatagagccctggctgacagcctaactcacaagaccttgtgccagaaccaccaggtgactctccgaaactgagtcagtaaatgtttgttgtaggtttctctgcaattttggttttgttttcttgaggctaaatgttattatatagcttagattgacctggagcttgagaagagtctcctgcctcagcagcccctaactgctgaattacaagtttgtgtcaccatgattagccatagctgtcctggggtaaggcactgaggagagaagacttctgtgagaggtttgagtaggacccaggcaccaaggatcctatttcgagccctttctgtcatggactgtcttcttttcctgcctgttaatgcccacagcttcatttgagggacccctcagcatctttcagcctcccttcccttttgagtccccacccagaaggtcacatgtatctgtgtctcatggtgtgtgtgtgtgtgtgtgtggcaggagagatatatgtgcagtgtgtattagtggccttcatgtagcatgggttgatttgtgagttttaaatgtaaaggaacatgggttcagctgtattcctgtattattttggatagaacatggatgtctgcaggatagctgtgtcagagggcccagggtgggaacctgtgcactttatctatgtgtcggtatttgctaattctgggatgtgtgtctgggttttcatgggcaaacgttctcagagcttgctctgtggtcctccaagggttaagggaaacaggcgccaccataactcttaatcatagctttgcaagcttagccagtgcccctgttgaaaaatgtttcaaaaagcaaaataaatgatcttttagttacagaagtattgattttgcccacatctagtaataaagagcaagtcacctgtagctaaaactcttgtaaaatatattttatactctaatagtctgcagatagagtcacccgctgagcacagatgacaaatctccccagtgcggcctgcgccccccatatttcacgtcagggacacagtagtggcgcagcagcagcaacagagctgggcctccctgcgggtgaggacatggcctggttggctggaagaaaagaaaaaaggcaggttcttagcacatacagccccctgcccctacccgggccttctgtatccgctctggttatgatggaggcttatagcagacagatcatcctcttagatctagaggtcacaaaaagagctcctctagtttcttcatacaaggggatgtttctccataccactcagtctcagaagctgatagtttgggaagctacattcatgagaatggatggtgtgtgtgtgtgtgtgtgtgtgtgtgcattaaaagtgtgtgttaaagaatattatcctaggtttgctcagtcatgttcatacatacatgtatctggtttgatcttttccaagcctctgtgtatgcataaagggatgtagttggtccgcagtgcacacatgtgcagggtaaccctgcatacggtcagagggagacacttgatactttctgttggacatgtaccatcttggttctgtgtagtcatgcagacacagtggactcattcagtcccttcacacagatccaccattcacctacagaatcaggctgctttcaaggtttcctgaattccttggagaaatagtcttcagtctgaaatgaccaaatagttacttcagtagatgtgaggctcagtcaaacatgaacctgccatccgtctgtctctcccagccctccttacaagtgaagggaagttgctcaagtgggaaagctggcctctttgtcttctttgcttcccagaggggatgctcccagaaatgaagcctaaacctggaaggccacatgcttttgcctcattctgatgtgtgtaccagggcagatctcagcatttctgtgagcctctgttctcataaagtccaccggtttctcctggcaccatagtctcttagagaaggccatttgctatcttcccaatgagggcatcctcacagaagccaggactctccctaccttctacctctctgacttctgcctgaacggctcagaagtgtctgctccatagtccccacttggcattagatggatgcgattagctgccactccaccattcccacaggaggtattctggggcaaagtgggcagaggaaacttggtactcaaaagtagtacagggtacccttgcatggaaatatataggggtttcgaactcttgttgatggaggttgaaggagtaaagacagacacatttagggagactgatgggtttaagaagttccagaggaagggagggaattctgatcatacgggagatcaggttgggaggcagggatgggcaggagtttcagggagatttggagagctctggaggtgggtgaggtagagcagggagcagtttaaccacgaaggaagaccactggcaactgtgtgtgtgtgtgtgtgtgtgtgtgtgtgtgtgttgagggggttatttgggatggaaaagcctggaggacacaggagaatctttagcaccaggggcagtggcttgtcgaagggaggggacagagcaggtagctgccccgcgctgggattgggaagtgggggtgaaggggtagggaggcctgtttaagcggcggccgcgctaataacctgtccaggagatggctcgtggcaaattgctttgttagtcttgtcagcgcggccagggccgccgtcagcgcgcgccatggatcaagatgatgaatcgccgtggatggcgcagatgcgggcggcccgcggccgggcccgggggttggggtgggctgtggaggggggccgcagggggcccggccaccgccattaactcccgaattagctctaagccgcccaccacatagccactgccctggggagcgcggggccgtaggggcgggagcgagcccgagatacagagaggctgctcgcgctcgcttgcacaccctgaacctggaccccagcctccagaattctgactcctctggatgctcctggattcctttgaatgcaccccccccccagtgggatagaacctccagtcagccgtgcgagtctgcctccgttgtagccctgtgttaggctttttagggtaacctttgctaactagctacatcccacgaactactcccaactactccaaacccccgatgtagtgagcagatgggatgggaggaggtctgagctgcagttctctttcagtgtgtgtgtgtgtgtgtgtgtgtgtgtgtgtgtgtgtgtgtgtgtgtgtgtgtgttcggatggcctgtggggggagcgggtttttgaggttgtcgttgctactctacatccaggagcccagagatcgcagataagagtttagggggacttgggcccctcaatttacttcaacaaagacacctagtatccctggagtccttggaaacctgtagggactcacttctcccagttcctgaatggtctcattccttgaccaccccttcttggtttaatttagaaacatcccccatacatacatgtacacttaagcagaacctacatgttcacatatgtatatatcgaaacacactttgtgtataaatgggtatatattcataatatacaacaggttaaagaattgagcaaacacataagcaatgcaacacctactgtctcctccccacccgacccctgaagccaggtcactttgttggggggtgggtcctagtttttcccggcattcctttctcttaagctctttgaaggtgtctcagccacagcctggggcaggtgggtgggtgggtgaggaggctaagaggagcagacttgggaggaaggtcctgagccatttttattcctcagtttctgtctagacagtgacatttttgaagtgcctttgttaacccagcaggaccccccacattgtggcttgccaagtttctcactactccaggtctccctaaaaggcgcagcccccttccccagccttactctctttccctgagtttctatctgagcagttgagctcatctggaattttgtatctcctcttcccaatccacaataaactcaggagccaggacctgggctacaatgtctgtggaaaccagggtggagggtgggaatgtgatggagtgacagcagctccctctgtccttggtctccccttgtatgaaagccctttgaaggtaagtctagcctggcactgtgggcttctccaggtgtctggaattttgagttgcatgaggcttagcttgtttaatgagaatgatactggctacttagccactgtagtggctattcctgtgttgtcaacttgactctatctggaatgaactacagcccagaattggaaggttcaccagtgatcttaatctggagactgggagatacaagtttctgacctggatcttggcatggagatcttggggcatagtggctatgaattccagaagattaagaccgggagatctctaaattcaaggtcacctgggattaaaggcgtggtggcacacacatttaatctgggttacaccttctgctggaggcctgcataaggacactggaagaaggaagattgactctcttttcatccactgattgccttgtgggactgagcaactgctagatccttggacttcccttcacagctgctgctgaccattgttgggagttggactgcagactgtaagtcaccaacaaattcctttactatatagagactacccataagtcctgtgactctagagaaccctgactaacacagacctgggatgactgaacggatggaggtcttggcagcctggggtaagaagaataggaaggggaattggagtttgtggcaaacagatccttccagaagcaggtgcctggttgggtcctatgctcatcacttgcagcctgcagcacggaatctgtggtatcctcaaccactttgtcctcctcagcacagagccattacccttcagcttgcccagtggtcccctgttctgtccaaggaggggagctagggcagggtgagtatagctgggtcactgaataaagacagaagacacttgcctcactagaacaaggtttctcattggatgggggaggggaagtactatttctggcctaatcaagtagtatgcacttgtgcccagagttgtgtgacagaataagtatatatgtgtgtgcaaagctctatggttttctccaggatgatctatgtgcgtgtgtgtgtgtgtgtgtgtgtgtgtgtgtgtgtgtgtgtgtgtgaagggcaggtgggtggaggtacagtggcaatcttgattacctaagccaaagaggcaggccttcactcccctccctctccttctctcctctccccttctgcactagtccgagatccctgaagagaaattaaaaggttatttaaagcccccgcctccgctttttttgtccctttaaatcgagcctaaacggttttgctttggcagaagaaatcttttctggagcattgaggtggggggtgggggatcctggtgggagagaagggtctaagcagcctaatcctcttatgccccccctccctttctttggagcctcctccccctcccctcaggcgccctgcctctaactctgggttgaagatcggtccaacctctaaatctgctggtggctccctctgttccaccaaggccaacatttctggccctctcaactcagcctgggatttaaaaatctactgttaagtacggcaacctccgccatgccttaacccccaagaaaataaacagcccacttcctcagagctaggccagagagtttgcttgtagacctgagcaatgtcagaactaggatccagctgcctgtctgtccagacacctggattacacttgacccgaaaaaatcacacaaggcttctttaccaacacacaaagaaaatcccacagttacacatggactgtggttacatgagcaccagtaacaaagacacaacacattctagtcccagccactgaggccaaagacaccttgcacagagtactgaccacacaagcatagaacacacacccttctctccaggtaccactgtcgtatagacacagccttccaggcttccacagagtcatggccacagtagccaatcttgcactacaaggttcccacattaacggggacacctgaccccttggcacacacctcagacacacaaggccttctctggttccacagcctcctgcataacgacctcttcctatgaatcagttgcacctggaaggagaaggaggctgacaagaacctcaaaccctatccagggatttttccgctttgtgaatcattgctctctctctctctctctctctctctctctctctctctttctctttctctctccctctcccgcggagacagagacaggtgcatgtgtgttgtatgtgcacgaagaagtgagttcggcagactcagcctcccaactctctccaagagcatcctgctgtcggaagttccaccctgtatgggttgagcttgggtggtgagtactgagtgcaggttgtgttcgtgcgggtgttgtggtaccagaagtgtttgtgtgtgtgtgtgtgtgtgtgtgtgtgtgtgtgcgcgcgcgcgcttgcgcttgcggttgcttaagcatgcagttgcccagttcaaccttgttgtgacagctggggagggagacaaagccctccttaagccatcgcagagcaccccaaggtcaagggagaccaggtagacctaggtgaaggtttctcagtactcctcaactccgtagggattgacctgcggctttaccgcccaagatccagagccagcaatgacggaacgatattctcggggaaatgatggacgctgccggggtccctagttcctctaaaggtttgacccgggctgcctaggccttgagctgcgtagatgttccagaggggctgggcggggccggggcgagagtggcgtgtgattggcagccacaggggccagtagggagcgcgcggccccgcgccttgcgcccgggaaacgcggtttaaaactccagctccagcccggacgcgcgtagatggcagcggcagcggcggcgcgggccaaggagaccaggtgcgagcgggcggggctggcggggtgcagccaggagcggcctgggacccggcgggactgggagggctcgggcggtcagctccggggaccttctcctcgtttgcggtcctgtagtctgggagtcggtgggcggatcggaaagtttgaagagggtgagagacttggaaggcgacagacacttaagccttaggggagacgagatccgaggcaggaggagggagctccatggggagaaagagggagcggagcgatccccagggtcggacacgaagccagggcgacagaaggaaagaactagaaattccgaggcagaaaggagggcaagtcgtgggtagaaaagcgctgaggcggagacggaagcctcggccggcgagacgcaggcacccgcagagaacgcttcggatccgtcacggttttgcctcatttggaagatattacttcgcccctgaaaaaaaataaatacaaaaaaggtttggatattaagcggagacaaatcctttttcagtttggaagggggcggcgggtggggggtgggtagtcagggtaatgcagagcagatgcgccccgaggcgtcacgcagcccgcggcccaggctggagagggggcgcggtcctccgcccaggttccttgcccgggatcccgcagggccacctacacctcccagcgtccctattcccgagtaccccgcaatactgggatttagctcagaattcatcctttctggctacctagggctccttgtctcctgggattgcgactttacacgaattatttggccggggtggtttggcgcttagcctgcctctgccctcgtagacacgacctcaggttaggatctttcaggtgggtttttggtccgcaacggccttagttctctggaattcgtttggcctcccacggcctgttttggcgtggagctggcgtggagcgggcgaactccagcagggaattcaggctggggcggcgtttgggaggcagggatcaaaaaatgaagggctctgccagggtctctcctctctgggcctctcattccggtggccataacccatcttggacggcgacaagctagggcctctaatggacctttctggatcttggctgaagtttcttaagttcccagaccctgatcaggggcctccaaggcccgggcggtgcctttagagcacttagggggaaaacatcttcttcctcaaattcctatcaatctggggaccaaatcctggtagggggctgagggctctcggtggtgcagttgtgtagtgacttgtcggagaaaccaaggctaggctctgggagaattgtatctagaggccgggcctttcgcctttccctttttgggaacattccaaagctgggaatccgcggggcctctagtgtagcctcagcgagggttctgcctggggcggtagaaggactttttcgttttagaaaaaagcggacggacgggaggccaggggtcttctggactagtactggttttctgtaggcaacttgggtttggggacgtcgcagagagctgagggctttacttactggataggccttggggcaaacaggctgttttcgcaccactgaggttgcaggcgtagttgtggaaattgtagaatctcccggtctgtcctcgcgaaggtgggagtgggagacgtgtcattttcttcttttgtgccgtgccagggatcctgtgcgtcgcaggcgggttggctctctctatagggcgctggccaaggaaattctgtggcctatccgttttaagtgggttgcagtgagctctgttttcagttttctttccttttctttttctttttatttattttttgaatccgcgcttcattttcttgcatatctaggttttagaagggggaaggcactctcccctaaagataagtttctattacccttcttccctaaccagctgtgcttatgtatgtgggtgggtggtcaggggggaaaaagtaaaatttgctgcctagtgagagcaaattatccagataatttgctccaatttctctcctctacgttggagtctttggataagaagcaaagcaccgcaactcaggacgggatggtcaccttacctcatcccgtcaggcctcaggggcacagactcctgcaaggacgcaggaacttggttgcacagtcgaaagtggaactgaagggcaaaggttcgaagaattggaaacccgtcccaggcgaaggccaaatgaaagtgagctttaggatggctctgttggctcaggggtcagtttcctgggctacgggtgagtgcttgtgggaccccttgataatcctctctgttattttcaagttactatgattccacatggtagcaaaattcactgcttaaaataggtaactggagttaggcttgtggtctgaacacacagagactgagctgggaggggggtttccaccgaacctctggctggcatgctagatctgaaatgagtactgggccctggctttggctgaggatattttggtgcctgggatgttggggagcgacagatccacagatccggaaggattgctggggctcctagcagactttgaaagcaagaggaaaactagatccagttgctgcagcaatcccactccccaaataacgtagtgctcccccccccacttccctgtattagaaaggggttagtctacattgactgccacaccgagtggaactcctggcttatagtgacctggcacactgaagtcacacaggcagaaagatctagacacaaattctcagtatcccctggtagacacagtcacacactcccaggttaagccttcaccgacactcgcagataacccgtggggcgactgggcacagagagacagcccggacttgggacctcaccttgacagcccaagggcatcggagcctaactttttgtccgccctccatttctgtctttctccggagcctggcagaggcaccctacccttctacccagccatagtcctggaggaggcactctccgccttgcccgagttcccattccacaccccctcctccctggctcagtcccttccccacgtcccgctcggccgccccgcggtgcccatgtaaatgacagcaataaatatctaatcaaggccgcgggcgacgccacggccattaggagcgggcaggctggcgaagtgggaggggtgatgaggagctttgggttgtgttgtgttctggcctccaaattcctcctgctttgagtacccctcatccctgaccttgagcgagtctccgtttcacctcctgtcaaagggtacttactgtgctgggttctcctcccgctgccctccccccctcggtttgattatccgtctggttttccaacacttcatttggttgagctggggtcctcctgcctggttgtcaatatgagtcggcagaaccctcattccagctttagcccagtttctgtaagcaaaaggaagagcggccctagctgcccggtcagcacacttggctttttcctgtcgcggtcactcccgcctctgtttaacggctctaagcgcgccgcaaccatatgcccttaggtcaccggagctcactcgatctccaacccccatctaagcgccatcgccccagctgtcagggtttggctgccgactggtccatcccaacaggaatctgcgtgcagtgcgggaatcgcgtgctgggtactagcaccacagacccttgcggcgaatccccaccagatgtcttgagttaccttctccaagagggtattctacagtcaggagaaccttctccacagagagactctacagtgactgctctgggtcttgggtctgcatgatgccagagcggcccggcccacgcctgcggtactccccggtctgggcaaacccgtcgagcccagcagtcttttctgcccaggaacagcgggatatctgacccggtcctcggttccaacacagtcgtgccatgcccctggtctcccgctctctttgcctctttgagagaggacacaggaagcacagagtcaagcagttatctctagacctggagttactcgcagagactgaggtcaagtctgccaacccgccctcaagagcggaagcttgaccataattgagaacaccaaaacgtcagtaaatctctctctctctctctctctctctctctctctctctctctctctctctctctctcattttccctcccacagtcgcatttcgctgtttcttttcttttttaaatttcagccgtccgacttcttagcaccctaaacattaaggacctcagaaaatcgaggactgtaggcaaaagggcctctcacagtctcggcccattagcctgtggggggctaattaccccaattagcggctgatttataattaatggctcggaccgaggaataattggatgttaatggataacagtgtgtgtagggaactttaagagactgagcttctctgggggcagcaggctaggtcatcctgagacacatccccatccttctcctgcctccaccccctgagcggagagggctggtcagggtttcctttgagcaattttctggtgcagcgtgcctgaacctctcctgccctgaccctgctaaagccatacctcaatcccacatgtgtgcttttttggctccaactccaggatcacgttggaggctgctccacagtgaggatggctgggatcccgctacctcaacagcaacggccagaaggtggcttgatgtttatctggtggggactgtggattttccctgctggggtgggacaaggaggagccaggccaccagttcacttctctgagctccaagttcttctcctgcctgtctcagctgtttcctctcacacgagcatccacgcagctataacgcctatataacctgaaccttcacactgcaactcaccacacggaaatgcactgtaggccaaacagtggctccacgtttatttgtggaatcgatgccagatactccctgtgttgcattctgggaaccaagtaccagctggggaattcagaccttgagatagagggaactcatattggccagacttagaactctgatgaatattgagttcacattgtggagtcaaatttcttggattccacattgcttaagctgcttagctatgtggctttgggcaggcaggtgatctcacctctctgtatcttggctttttttttttttttaatcagtaagtgggaattacaatgttgtagtgaggattcaaaaacatgtatgtaaacttctgagctactgagctcctccaggggttgataggccaggttgccttaagccctatctcccacccccgaacccccaactctctctacttgtagagagtattatataacttgtatcaacaggtatctacaagcatggttggtaaaacttgtgattatttggtagacacaggcaaatgggaaactatataatttgttgaagtaaagttgtgacagaaatgtaaagaggtcacccgactctacctagagcattggagaggcgtcctggagaaggaaggttactaaacctaatatgaagaaggaccatgagttctcaagtgatgctgatgaggagacaatattcccagaggagcaggaggcaatggcatagtggctttggggaacaatccctccttggctggcggtagggtaatggtgcagtgggctagtgaggagcagcggagaatttgaatatgcttttcaagaaaaatctggccttgactggttccagagatgactgagagatggacaatagaaataagatgaaatgtttactaaagggttagtggtgcaaaggcgatgacacggggagtgagggtctgagggaagtgactgtgccccagacctccaagctcttacacaaaagaagcaaatgacaccacacttctggccattacctcttacctctctctttaggttgtctccttggctactccctgtggtcttagccacactgattcatgagttgcccccatttcctagtgggaaacgtagtggggaagaatcatgtgcctggtaaggaaaagatggggctggtcccagggcttccaccacctttgagtacctgatttagattttaaaaattggggcgctgggaaggttcgcaatgacagatctggggatcactgagctcctacaaagcaaaaaacatctgaggagtaactggaatgtctcagtgccaaacctatacccagatgttgtgcctgagggtctttgggctgggtaggcaggggctccacatgcagcttatcatatgctcattgctggttcctccaaactgagaactaaggacatatgtgcgaatggggcagttactggggtcacactcagctgtttcagtttctaagcagtcagtgagctctttcttagcctcagttcttcatctgcaaagtagcaggaataaaaaaataccttcctagttgaacaggggaaagaaattaatgagattgccaaagccaagtgtctggcaggtgctgggcacaaaactgaaaatcttaggccaagccactctgaggtagaagatgggtcaggtatcttgtgtactaattccacaatgcacataaacttaggcactcacacagggcagaatctctcttcttttgcctccctcacaagatgtttggcctgtctaagtttaagcaccttcatggcaatcctccttagtctcccaagtgctatctatcattacagacatgggccaccatgcctggcttgctcacacagttttcatggtaaaggtttctctctctgttggagtagaccaaggagtcaatgtcttatcagaacaggtaacacagaccaaggtcacagagcacatccgagtctgagtccaagaccttgtgtgtgtgtgtgtgtgtgtgtgtgtgtgtgtgtgtgcaggaggggctctggcctcatgttctatattcatgtttctatattttcctaccttccagtgccaaagtcttttgggaattcaaactgctaagtaggaaggatagctgcagaggttaatcccctgagaggttctcctagagcttccagggttaaaagagcagcagtgtttctcaaggaaagaattccctggcaataggctccactcaggtagttactccatgtttgatgcccagggctagttctcactggtgcctacctgattcttggccttatgctagaattaatgctcaataactccccagagacttaggctcctgccctcctgctacctattgctagctgtgagatcttgggcaggggacctttatctccccaaatctcattttctcatcagtgtaaacagggacagtagtacctacagaacagtgctgccttgaagtctcttcagtgagaacacaatgcatagaccaggacttggctcagagtgaagcccagtaaaaggcaaccatcattggtactgaggcctcaggatgcctgggaactggcagaggagaagggaggcttacagagtgttggtttccacacttcttgttttctttctgtgaaacaaagttgttctgccttgttttctatcacgtgtggcaatgagaagaaagcgagggaaagctactggctacgatgaagaaaagaggtaaaggcggcctgtggggtggccggagcagggtgtgactgagggaaggctccactttccttttaatcaaagacgcttcgcatgtggtttcctgggagtgctgccgttaatttataaaaaatgccccctaataaaattctgcttgattcttcgattggctgggcattaggccgcagccagcagcgacgcggggacataacggatgcatttgcagatttggaaaattaaagccatctatatggcgcctgtggcgggagatccgccgatctgcttgcttaatgaaatataaagattcttttaaccaatgtaagcacaattcgacagcttgtgaaacgcggccgcaccatgatggatggctctcctggctcgccaggaattgcagggcggcaccttttaaatatataattgattctgtttggagtgtgcagtgggctgagcccatgcaaggcccagcctggggctcagcatgcaggctccagtttagagactccagcaggctctgcagagcttcacctaggtggttctcacaactggatgtgggcagattccatatgctgggcttggctgaagactctaggccggccaggctgtctgtgttcctggggaagagtccacatggcacaaacctctatccatctgtcatattcacacagacggagcaggtagcagggctgggattctgaaccgtcattccttcctatgcctcatagtgagctatggtggctttgcctcgatcattgtttcttgatctaaaattctcattgatttaatacttattatttgctaagccaagatgcctaccaggctctgtgctacatgttgcaggagaaaaaaaaaacaagggtaaaataaatctatgtattttatgttgaatgtcttcctcctagatttcttttttcccccctcctgatctgtctcacatcctgttcaaaattggaagagctgtgatacattggcccagcagtgggagatagggcccacattacttcctagaatgacatttaaagtacatccctctggttacattctcatactcgcgtgcgcgagcacacacacatacacacacaccccatttgtgtacagaggttcacagatatgtttagctgcagaggcatgtaaaagagacagatacataaaattcagacagatgcgcacacacttttttggtggatcccaatagtgctgtttctatgtgtggacatgcataggtactgacataagttatgagtatatgacaatgtggtaccacatgtatgcagcttgcgtgggaactagcatccctagaaaaggatccctctgaggcctgagaggaagctggagtcctcatgtccagctggaatgaggaaaggaatatgcgactggtggctggagagatggtgaagcgattaagggcgtctactgctcttgcagaggacctaggtttagttcccagcaccttacatagtggctcacagccatccataactcctgctccaggggatccaatcccctctctggtctccacaggcactgcatgagcttggtacacatatatacttgcaggtaaaacactcataaagaaataaactaactgattctttaaaaaataacaataagagaccacagagaaaggagttgagctaggaagacctgccttacacaaacctcatctcaaagggcacatgcacatacatgtacctacacacacacacacacacacacacacacacacacacacacacacacacatacacacacacacacatacacacacatacacacacacacatacacacatacacacatacacacacacatacacacacatacacacacacatacacacacacatacatacacacacacacacacacatttataagcatatatgctggtgtggaataaacattttttttactgtcctcctgttgcttaggatccaatcagagatgatagaaattgaggagttgcatatgctgaggtatgattctgcatgcctgggggttcatgggaaaactttacctgtggaaacatgccattactttctgggagcttggacctcagcaaattatacgatcattcttatctcccatttccatatatacaagatagggataatagcagtttctaccttgtatagcattggaaggattgatggtgatgtctgtatttcagagctacttaataaatagttgtcattaattcattcatcaaatcctaatctccccagccctgattttgtgtgagaccctggcaatctgggctgaaattggggtgtccagaaatgtgtgaggtgtagtctctgctacaaaggagctgtctaatgtgggaactggaagtgtctttatactctgacgtaggtgatagaattcagaaaagcagtgtatgctgggagtatggcttagtggtagagcgttgcttagcatgagcataatctaaggttacatccccagcagaggggacaatagagccatgcgaggtgcatagcataagtgtgtcatgtaaacggaagctgttgtagttaccattgtcatcctttttacctggagcctggagaaggaagaggcagtcttctcataggttgcaagaacagagccttcctgaggaggagtccttgagccaggactggaggaagtaagaacttatcggttaaaggggaggaaagtgtgtattttggggagatgcttatgggagaaagtgacaaggagggccaagtaccgggtgctggggaagaggcagagcaccaggctggatgcagaggtaaagggggggaagccagatgggcaagcttgggggaccagggaccactgcggtgaggcgtttatggggccgagttacgtacatcttgactcacttaatgtagatgctttgtgctggggtgggaatacacacctgtaatctcagcccttgagaagcagtggcaggtggatttctgagtttcaggccagcttggactacctagggagttccagactagccagaactacacagaaaaacctacccccccccccgacctccagggagaagactttttgtgcatcaaaaactgtgagatcagcaaccattaagtgaattaaagtgccactgcatacaacagtatgcttttaagcaataaagccccgaatttgttgggaagtgacattgcggtcacagggctgggaaatatgatggataaggtttttttcttcttcaagttgtgttccccttcctcatctggagcttgcaactccctttgaaacctagctccatctctgaatccattggaatgtatgaataaccctccacatactcacacccaaaccaatgataaaagaagattataaatacaataaatatataaatgtggaaatttcctgtaatcccgtctgctatctcttagagataacctctgtcaacatttcagggcagaaccttctagacttttccctatgcatatttattcatacattacaaaaatgagatcccatcaggcaccctgtttgttacctatttcttccatccagccatatattgcgagcatcagcacatatagacacatatcattgttttaagctgtgcgctgaatttcgttgcgggctgtgaccgtaccttcatttactgagctaatcctttctcgatggacagttagctttgcaattgtttgccatcataagcagtgatgtgataaatattcctgtacacatatctctgcatacttgagggataaatctgtagaaatgggattgttaaatgaaagatgatatactctctggaggcttttgatgcagagaataaagggcttattcatcagcaaggtagggggggaccatttaccacttccctgtgtagtaactctggatgataattgctctctgtatttgataatctaattggtgaagaataagtgactgcccccctccccgtggctatagctaaggattttgtcatatgtcagctggctgcttgtgcttctttatgagtttttccttcatttatttagcttgtttcttctcagggtgagcatccttttgcttctctactaaaactccatacattcaggctggagatacaacccggctggtagtgtgcttgcctagcatgcacaaggctgtgggttcaagtccgtctgtgctatgcaggtgaaggtaagaggagcagagtgaagggcagattgggttgcagagtgaatttgaggctagcctgtctcaaataaaatgaaacagtagtttagagatattctctttaattttcacatttgctatgtcatcagtgtgtctaatatttttctaagttacttgtctgtcttgagcgtcgtggcttatcctgttagacttaggtttggtctgtttatttgttttgttaagatggtttctctgaatagccctggctgccctggaactcgatctgtagaccacagagatcacagagattggtctgcctctggatagcatcatgcctttccttctcttccttagacttctgctcatgtttatgatgcatagagtgggctcctgtagctgctggaagacgtcagccaccagctgcagacttccatgcgcagctgccagtgcattcttactcgggcgttagattcacatttcacagttgccacggctcctccagatttgagttttatcctcttccttcttactttagtgtcttcctcagtgctcctgattctgaaaaagactccatttcacgcagatgctagggccccaaactacagttctctctgtcccctttgctctcctttcctcacatcttataactcacccaacagcaatgaagccatgctcctttcagactacatctagaagctggtctcttctctcctctcaccgccctcccacgaagagaggacaccatggataacacctgggactttgaagcaatgatctgactttcttcatccccaccgccccagtctgttctgcctgcagaaacacagtgaggtggaggggctttttgtttgtttttgagacagggttttactatttagccctggctggcctgatctggccagagatctgcctgtctctgccttccgaatattggtgttgaaggcatatgctactatgccttggcctatgaggaactttaaataaataaacaaatgaacaaacaaaaagcaacctcctgggacttgtgaggtagcttagtagagagaacaactcccacaaatagttctctgaactacacacacacacacacctatttacacgcataacataaataaataaaaatgtaataaactttattaagaaattatggagaatggagtaatggcaccataaagtacttgctgtacaaacatgaattccctgggacttaccagcaacccagtttagcataattggcaagctacaggccaataagagaccctgtctcaaaaagaaagtggacgtttcttgaagaatgatacctgatattgatttctggcttctacatacatgcgtacgtttgtgcatgtgtgcacatgcatttgtacacatatacacctaacctaaatcatatgcacaaatgtgtacacacacacacacacacacacacacacacacacacacacacattcacacacacacctagcccaaattatactgtattacttccctgtaaaagatcctctagggactttccctcactcagggataaaaatctaaactcctagccagggaggtggtgatgcatacctttaatctcagcacttagaaggcacaggtaggcagatctctgagttcaaggtcagcctgggctacaaagtgagttctagaacagccagggctacacagagaaacttatcttaaaaaacaaaaacaaaaacaaaaacaaaaaaaaaccaaccaaccatgtgagccaccatgcgggtgttgggaataagacatgggtcttctgcaagaacaagtgctctcaactgctgagctacctcgccagttccagaccctggtgttagtgttgactcatagacttggtgttgtttgcactttaggaactctgtccttactgatcctttggtctggaaggctgttccctgagcttcacacggcttaccttgcattagatcatagaagaatctctaaaataaccttccctctctttcttgtcattctctttccctgactcattcagaacatttgttcctacctgacacattgcatgtatgtttaatcacacacacacacacacacacacacggagggagggagggagggagggagggaagaaggaagggagccctacactggggaccaagactgaggcctagggcatcattatacgcacttatgctgagcaagtgccacaccaatgaactacatgcaccaccattttaagacaaagcttttcaggctgaagagatggctcagcggttaagagcactgactgctctttcagaggtcctgagttcaattcccagcaaccacatggtggctcacaaccatctgtcatgggatccaatgccctcttccggtgtgtctgaagacggctacagtgtgctcacatacataaaataaaaaaattctttaaaaaaagacaaagcttttccaagttgccaagcatgaccttgaatctgatcccaggcctgagtctctagatagctgagagaacagactgcgatgtcagacctagaatatttatatcattttaattttatccttacttccctgaaatgtaaactccatggagttaggggcattggtacttggtaggtgtgtgtttaataagtagttgttaaacaaatgtacagtgtgtggtatagtgcctgtgtataggtgtatctgctgtgtgggtagacctctatggaaatgtttgtgtgacattgaattgaattctgtgcatgtaagatagcttctgcgaagactttgccaacagtgtctgtatgggattgtctgtgcttgtatgcatgctgtggatgtttggttgtacacacacatgcacacacacacacacacaagcatgtgaccatccttttctgtaagaatggggagctgatacacctggtcatgtacccctaagaaaagaacctgcattacaactcagctttcccttccacctccaatatccagggaataaacacacctcctttgtgcctttgggtggctacaaacatggagtcactttccaaaagtgatgtcacttcaaagccactttcaagctgatgcaggctgagggttcagatgagacagcagggttcagaggtgacctagggctgacggggcctggacagcctcttgctcatacaagacatctcactgggagagacatgttccttgacacatctttcttgaagtaattgactacagaagaaagcaaccccagtgatgtgtcgcagggcaggtctccagttgaccattgccttaacagcattcttctttctctgcgtctgctgatggggtttgtggttcttggcttgcttgctttttggggatttgtgagaataaaggcggtaatggcagtgaatggcagcgagagtgatagttttatgtctgtgaagcagagtagggttttaaattactctctcatcagagcaaatgcctcagtggggaatccagctggggacttggctccagggaaatgcaatgcaatggtgttggttgaatgagtgagttgcctgtgtgagtaagccaatggctgtacacgtgagcgcctgggggattcaacgaagagggccaaataatgcagaaaacggattgggcagtctcaaagactaacttgtttgttttattttgggacaggatctcatgtagtccagactggcctcaaatttgctctgtatctgaggataacatggaactcctgatcttcctgtctccatgcccaagtgctgtgactaaccaaacgggctccaagcccagctaagacacctttgagcacatagtaccccaggccatattgaaaaggtttttcttagttctcagtaaccctggtcggtgcttagtcctactgttagtgaccttttctggagacagcaactgaatgagggtcagggaagttgggtgagttgtccaaagtcgcaaagctctgaaggccaaagctgtgattccagcccaagccatctgactgcaaagtgaaccactggatgaaggggtgaatggaagaataagtgcccactctgtgggcaagacaaggccaccttctggtctcgggtagaagcccttggtaaagtggacgtgaggtctgggtgggggctgatgtctctcccaggatagaattcaacagccacgcctcataatccttctctgtcttcccacctgcaggcggatgccgccatgcagcactatggggtgaatggctactccctgcacgctatgaactcactcagcgccatgtacaacctgcaccagcaggcagcccagcaggcccagcacgcccccgactaccggccatcagtgcatgcgcttacgttggctgagcgcctagctggtaagggccctggggacctggccgtggaagcaagatgctgggggaccaaaataaggaggttatgaaaggtaaaggggggagggctgtgtgagcagcttattttaggtacttagaaagcccttggtcacttagtaactgatgactatgctgtgctggctctggtcgcacatttacataacatctgtgcgagtatctgcagaatactgctcgcttgccagcactgtgctgggtcctggagctacctcagcttttggtttcctataacaaacctttaaaggaggtgctcattagccctgcctcatagataggctaaggcagcgggtacaggactggcccagggacctttctctgggaagtagatgggagaggactgggtgccttgggagaagactgaacatggggagatacagatgatggttctcatggtttgaataccggttaattgccaggccactgtgtggatctccatccaccccccttctctttttctctctacctgtattcaaaccccaagaagaaggtcactgcttcattttatagacaaagaaacttcagctcagagagaataagtactggagcgtctggggattggaacatgaccgtatgaggtcagacttgtactcagctatctatctgtacattcacctcttcccttgggacctagtggtagttctaggatagatggcaggaagtggtcagtgaatcatggcaatgcttgcagtcatcagtactcaatgcccaaagcaagtcccaggcacttaagagaggcctgaggctgaagctgacttcggttgtcctcctggtcacctctcagatgatgtcagtgccagcttttccgtgactgtgatgaaatatggggagggacaatttaagaagagacgagttttattttggatcatagatttacaagttttgggctgtgattggctggcattacttgctgtgagattgtattgagcatcatgtcagagagtgcaatgcatggtaaagctgttcaccttatggaaggcagaaagcagagaggagggaaggagtcacggacacccacagaggctcacttcctccaccttagccttaggtcctagcagccatttagccatgagtccatcaatggatcaaccccttgataaggttaacagtttcatgatcaaatcaccttttactagtgctaccagctggggacaaagcgagtcttcagtccggtctatatccagaaataacaatggatatgagcaggagttaatgacatagacagtaggctatagagttcctgggaagtgatgctgcccagttcacgatgtcccagtccaaacctgttcagttgcatagggcccatgtccatgcccggtagttgtaagggactgcatagaactccttggaagaccgagtgtccgtagatccataagaggacatgatgacctgagtcagcgtgggacagcttagggcagcatgatgggcaggaggcaggagacttttcaaagctccacaagggggaagaatcatcaggagactgggcacaggagtgggagagggtctgaggaccatgcctaccttgggataccagcctggcaggaagacatagcagccagccctacttctttagaccttgctgggcctctgaacaactgagtccctggttgcctttttggatcagtgtagacattagtgtccagtgtggtggtagtcagtgtagacctgccccagctatggctacttccctcgtttggagtgaattccttttgtccattgtgccagtgacatttagctcaaggactatatcgcagagaggattcgggacagaggctcatgcacactgataggaacagaggaattagggtgtttagcccacttccaaatggccaacttttaaggaggaaatgagcccttgtaggggttcttatagaaatcttgccttccatggcaggtgctgtatgaggaagcctggtctcctcttaaccaccccactccttgtagtccttggagctagcactactgctctgatgctgagatgctgtctctccactagaatgggtgtgactaagtggtccccactctctttcctgctcaagggtaacacttgtgacttcaggtctgcctgggctaagattggaataagttataaagggtcattctttaaactggagaagtatctcaaagtctagggtttccagtacatttctcctttagggttttgtagaaagtttcccaaccctggagtacaagaggactctgtggtactgttcagaggcaaaaacaatttgagctccttctagcattgacacggtccattttttgtgtgtgataggaccttacagcccaggtaccaggcaagcagaagagaaaagagctacacactagcctgagagagataccatcttggctgtttttcatgttaccaaacacaagggcaagcctataggattgatggttcatcagctttggtactccagtccaaccttgcagtgtggggatttgttctcttcccctgaagaggcagagagagtcaaggctgggtgtgataagcctttcccatgtgctgtgggccctgccagggctaagctttctgcttagcaaacgagaccagaaatctcatgtctttctaccagagacgcatagacaagggaagaggatgggattgaatgtgagagacagagactaggtctctgcccagtcagccttcccctaagtcatccttaagacaagcctcagcgtctggtgctaggaagtcatagtgcccagaatggaggctgttgacaggttagaaaaatttccgatcccagccagtgagagaggatgggtaatttccaaggaccaggggtcagctctgacggctgtttgggtgtccaaagtgggtcagagcaaagtcaggttcaaagcttatttcccataattaaatgggccttctctgcttgccctccaacggctgtacatttcaagacatcatcttggaggcccgctatggctcccagcaccgtaaacaacgtcggagtcgcacggcgttcacggcccagcagcttgaggccctggagaaaaccttccaaaagactcattacccagatgtggtgatgcgcgagaggctggccatgtgtaccaatcttcctgaggcccgtgtacaggtagggtccggctctcccaactgtatcttgcagataggtgctagccatccagctggtgtccagttgtccaggagtcagtgtctactggggcagtgctgagatacatgtctacttctctcatgtttatttcaaaaaatagatggcgttgggttagggaggattatcacccagggtacaatttttcctctcctgactgctcctctccatggcccccaggtgtggtttaagaaccgcagggccaagttccgaaagaagcagcgcagcctgcagaaagagcagctccagaaacagaaggaggccgagggttcccacggagaaggcaaggtggaggccccagcctcagacacgcagctggaaacagaacagcctcctggtttgcccagtggtgatcctcctgctgaacttcaactgagcctgtcggagcagtcagccagcgagtctgccccagaagatcagctggaccgtgaagaggactcccgtgccgaggagcccaaagctgaaaagagccctggatctgagagcaaggtgccgggctgcaagaggggcagccctaaggcaggtgaggtttggcgggctggggattcagggcgcgcgggaaggggtgtgtgtgtgtgtgctgcaggcagagtgggaccacaggtcagagaaggccaaatccagcactctgagtatgtgacctggatcaaagcaggagagtcaaacactggctggcattcagaagcgtgactggctactgcagacctgtgacccatgtccaccctttagttactgagccatagaaaggtctaaatagagcttctagatgaggttccaggagagagcatgggaggcagggaggttgagaacggaacaggtgagggactgactaaatctctttcaccatttatgaattattacagttatttcaatatttagcaaccagtgcagatataccagtgtatgttgggcggataccacgctggtacctgatattcccgttacagcagatttcaccctgactcaacattctatcaggacttggcctatgctttctttctttcttttcttttcttttttttttcttttaaagatttatttattattatacataagtacactgtagctgtcttcagacaccagaagagggcatcagatctcattacgggtggttatgagccacccaccatgtggttgctgggatttgaactcaaggacctttggaagagcagtcagtgctcttacccgctgagtcatctcaccagccctggcctatgctttttcatcccagaggtctagtccattaggcgctcttgtggaaaggagatctgctgagagggtctagaggatacgtcttctttttttgctttgttttgttttgtttttgttttgagatagtgtttctctgtgtaacccaagctgtcctggaacttgatttgtagaccaggctggccttgacctcacagagatccatctgcccctgtcttccaaatgctgggattggaggcccgtgccaccactccctagcaggatggttttttgtttgtttttgttttgtttttttaaagagggtctcattatgtaattctagctgacctagaacttcctctgtagaccaggctggctttgaactcacagagtccaactgcctctgtgtccagaaggctgggattaaaggtgtgcgccaccactcttggcccaggatggttctttcgaggactaggcacatccatctctgctccccagagctgctctgggctggagcccctccccctagccagggtgagaagaaacagagcgctggcgagctgtatatccagacacaaaccctaagctaggcaaggaggacagaaggcctttgagctgagggctggggagagaagattagagtcctgcttactcctggacaagattaaggcattcctcagggaactggggcatgggtgcccaggtaggagaaaccctgcagcttctctaagtccctcccaacccaattctgagggtcacttcagaggatgccctggctgacatggggtggtgatggttctagccagactatgttcactgcttgattcaggggattggagcgagcctctcctccgagcctagttctcttgttctgagtacttgttttgtgtcctctgcttgcagattccccaggcagcctggccataacgcccgcagccccagggggcggcctccttggtccttcccactcctactcctcatccccactcagcctcttccgtctgcaggagcagttccgccagcatatggcggccaccaacaacctgatgcactactcgtcttttgaagtgggcggtcccgcacctgcggcggctgcagctgcggcggctgccgtgccctacctaggggtcaacatggccccattgagctccctacactgccagtcctattaccaatccctgtcagcagctgctgctgcccaccagggtgtgtgggggtccccattgctgccggcgccccccacaggcctggcacctgcctccgctgccctgaacagtaaaaccacgagcattgaaaaccttcgcctccgggccaagcagcacgccgcatccctgggactcgatacactccccaattgactgtctggcttctaacccaaccatggtcttgggtgtacccctgtctcggtcccatggttattctcagaaggctctccaagttctcctagaactaactttgagagcccagggatgctggggcctggagtcctttcaccttgtctcccttattcaaagtcccaatcccaagtgaaacccacacaccctctgcatggccctgcttggaccccatggaggtcaaatggggaggaggggagcaactggctacaccccctcttcagtattgcctcctccctcctgctccccccccccccgttagtaagttgaagtgtggaatgtgagatataaatataaatatataaaactatattttcaggcactgcctgccccaggccccctttccctgttctcacatcgccactacccttgcccctgagattcactccagcagattctctctctctctctctctctctctctctctctctctctctctctctctctctctcatcctcctttttctcctgatcccccctcccctgcagccccactgcctctgtcttgatccctgtccctctacctacccttggcctttggtgctggctttattattgtccagtattctcaaacagtgtttcttttgggggttgtagggttttttttgtttttgtttttgttgttgttttttgttttggttttagtcattttgtttcttcctgtttctcttctgctccgcttggctatctcctcccttaacctgaactctctctaggcaactcttccattccatgccccaagattcatcaaagtcctacttggagacccaggagcaacaggcaggaggtagctctaaccccacagcatctccagatattaggaggggctcacagtcaccttttcttctctttctttgcttggaagtacccgctccccagattgcagaggggcgtgcagccgcagtagaacagagacctcattgcagggttctagaatcccttctcagtgagtgaacccttatggctacatacggtctcaggacttggcttcctgttgcagaggccggtgtgggagtaggcgcttctgtctcgttagtcactggcatggcagggtgtgttcttctatgtctaggcaaccctgctctgtggacgccctttcaagcttgctaggactgtcttgtctggataagatgatttagaagattctgtccatttccaaccacccagtgttctatgccacaaccttgtatggcagaggctttaattaagtttaataataataactgcagcataagcacttagagaagcccagtttgtaagttagaacattactgttgttttgctgaggaacagtgagtcctgcatacctgaagatctctgtggatactgcctctgtttcccagtaaatgtaaatggctcctttttaggttagacaatctggatttgatcctatttttcttggattccagtgtgagggggggggctactccattcccctgcccatggtgaggggtgggcaagattacttgaatagattcatggttatgattccccaaccctttggcttgccacagaaccctcaaccccacgcccacacagtggtggcctggcatgactggcctacagagccaatagtgctcaccttagtaatgtcagtctggactggggtaggagaaggttttagccagtaaaaagtgagacaggaaagcatgaaagaaagaaacaggagaagtgagccacggaacacaaggtgactggcctcgtgagaggtgaggcagagagcctaggacgcagtctcacattcccactttcacgcagcagcaccaaagtcagttgagggtttcttaagaaggggtatcttcctgggttctagaatctgcgaacatcagaggaggagagacttggacggggaaatgagaggttagcaaatccttagggagatgagggggttctgggttagggagggatcagtgatcgatccatggttaccctattgtggtcagcttcaagaaattatgtttctgtattgtctcatctggaaccaggcgcagggctgaaactgtctttctattcctgggtgcaaatgactgattgtcactgggacttgggatctaacacttctgggtattaccatttccagaagccttcccaacctcctaaagagcaaggccacctgaggtcatatctggtcatgacatgagcctggtctatcccaggcttttctaaactctcttagatctttgtcatgtgttctctcatgtgctgacccaaatcccgaaggccagagaagggagggaagacacacgtgggttttatcttcatgaccatgtcttcttaggaggattagagggcacgattctttgaagaaattgtgggtgagcccaccttcctgacactgctgatggaatctctctcaggcctgctggtcacttagggcagagagcccaaggattaaacccttacaagcccttctaggaagagtcctgtatgtctctgctctgtttgaggtctcctttgccctgcttcctcatttccctagagcatggttcaggggcctgggtccccatttctatgcagaggctgactggctgtatagactgcttttcaaaccagctgttttgtgaccacttgtgcttagaggttgtacaaagccttggcaaaaaacaaaacaccgtgtattgtatttatttattctgttagttgacgaagcaaaactcaaacctctcactttccctcgtcctgtcccctgcgtagcacagcatgatgctctgtcctgtatatctgtcagtcttttggccttacttcctgtgactttgtgacctgttcgttgtcttaattggctaataaaagagaacctggcagcacagcccttgatccatcttcattcccagagatgcctaccatgggctaaatggtagatggtgtttcagagtctcgccatggctgacgggatacaatgctggcccacctgtagcagctggcttctctgctggtttttcgtcactctctatgactcttgtctgtagctggtgagtcacattggagaagtcactgggaacagctctgtcttttctgagctttttttgggggggggagggggggtgtttcacctaaggtgagagggcaacctgggccaggtgaccagggggatgatagttctgcaaggtggagagggaaggataatctatggagtgccaagcaggccagaatcaaagctgaatactaggaaggcacatttgaatctctaggcatggtgacacacacctgtaaccccagcacttgaaaggtggaggaggcaggagcattttgaaggccaaccacccaggctacgtgagacttgtctaagaaaacaaacaaacaaacaaaacgactttgttgattttggtgtgtgatgtttttatttatttgcaagaggtttttcttaataataaagtttattaaacaaagaaaaacaaaagtccagagctgctctctggtggaacaggggcctttgagtgcggtgagttctttgttatcagaggcaggcatgcaggacatggagaggggattgctgcagtggtaaggtcacgtgtgtatatgttgttggaagtccatgtgtaggaatggggacctgtgccgtgacctcaagggcctactgactggtatttgtgttcttccggatgagcaggaaagagtgaaagccaggagacagggtatgtaggtggtagccataggaaaagcatacagttcagaagtttgtggtgtgaaatctttgcttcccctacttatttcaaggaaaaaaaaaaaaaaaaaagaaagctgggcatgatggtgcatgtcttttaatctctggaggcagaggcaggtgtatctctgtgagttcgaggctagcctggtctacgtagtgagctccaggacagccaggactactgagagaccctgtttcaagtataacaacaaaagagtaccagacatctccattctttgtccctcatcacactgatcctatcttccttctttgagttccagcatgtctgcaaggggacccattgccaggaggagcttttggatggacctggggctgggacctccctctgtcaggccttcttggtaggagaaccccaacaggcctggagagtttgcagataggctatctactggattttccagggtgggtcctgacctcactacttcccaggtcattgtgaccccaggagctgcattcctctcccaagtggggctgaggattacccccccttacctccctgacagatcaaatgtcaccccaaatctcccacagatcttacccaggccctcagcaacccagtgcttcctacatatctcagctttgagggacacaccttccctggcacgaagcttgtctggtaacactgcagttcaaatccctcactcattctgtcagcattgactgatcacctgctgaatgcctagtcccatgctggatgctgggtatagagaagcaagcattaaaaacgtgccctgacaatcgcagcttggggtgactcagagtttgaaaaataaggaactggcaacagagaatgtccttagttgagcatggggaggtcggataggtgctttaggagaaggacatgacctgagccccatatgtcaggcgcttcttaggaattcaagagcaaagggtcctaggaaaggcacagtccatccaagttgcaggactggaaggggcagggtgggactgtaggacggtgcggcggggtcaacagatgaaggtgggaagggaaactaagaagctgggcatgctgctgtatacctgagatctcagcacatgggagaagggggaggccacctcagctacaaaacaacaacaaaagtctagaaagaacaacaaaaggaaactgagtttagagtcaagccctagggctagagcctgggattttggaaattgggtgagtgaagaggtctgtcttttatttaaataattgcatactcctcgtgctttgtacatagtgggtcataacaaggagctagatggagtgagagaggtggccattgctacatcctgacatacatacatacaatacatacaatacatacatacatacatacatgcatacatacatacattgagacagtagcatcaatctggtctacaagagctgaggagaagggctgattaatgaggagtggtttgggatgtaaaatcaccatggtaacagcaggataggaagaccctaggtgctcctaggtctttggctcagctacaaggtagatggataccctactctactggacctgggatgactctgagcttagtttggtcttgttggcatgtaggaggagcctttcctatatttaggggaagatggtagcgtggcctttgttgttggtatggacttgatccaacaggttcttcgtgctatgcatcctttaaacactccacttaatccggccgcaactctgtgggttaagtattattatcatcctcacctgatccatgaaaaaaccgagttacccaggacccagctaaccttgaaatttatactcttaacctcggtggttgccaacccagagatggccacgggagccatttgactgaatgaaatgatacagagaagtctgagaccaggacctccaggaaatgctggttgtgacagagccagagcaaaggcacctcaacttgctgtttactgtgggctcttctccagccctcagcttcctcctctgtggaatgggagctgccaatcatgtctagcctgcttcacaggagactcagatgaggtaaagagtaagaaggcatttgaggggacagaagctgagcagaagtatatccgcccccaccaaccagtattaaagaggaccgaatgggcaagataggtttcctcaaagtgtaatctggagtttcacttttgcttaaggcttggccttgaagtgttctttcagattaggagtccattcctcagctctggtggaaggaacgcctgctgacagggcctggagatggtcccttttagggctggggaacccttccccatctctttcccacagagctgcactgggctagagcccccaacccctaatctctcattctcctttgcttctgggaaagccgattaggagccggcctcctgcccgcccccctgacaagtttgtctgaacttccaacaaaggctcttagagggttgaagagggaaggctggggcacagggaacctgacaccgctggcctgggatcaccccagcagcctagcaggttgctctgtggctctgcccaccctgtggtgagcaggaatgtgcctccaaggggacattggcctcacaaaggcctgggggatgcagtggggggtgggggtgggggtggagcccttcacctgagaaccctttgggactcctaagcaagcagtcagggactgcatgcattcttatacacccattacacacatacatcctaagctcccgccccatatgctgacttccaaattgagccacactctctgaatctcacgttcatgtgtgcatacaccccctacaaatatcatacacaacctgcagtctgccatctagacgctcccacatagctgctccacccccagaaacacattcttccggatttactcccatccagacagcccactgaatgctcagaggtaggggtaaggcccctctctagacaggaatctcttgagagaagggccagcttgggccaacagctccttggtgatagttctgtacttgtgaagatgctgtcctgctgcctgcgtgaggtcctacaccagccctgtcattcatacacccacagctactcccacacacccatccaaggggctgccctttcacacacagcagcctcccctttcagggctaggttcttggaccccaaagaggactcaaaaagggccctgggctcagaggcctcgtgacattcagaagtgggcatcttggaattccttatttatttatttatctattcatatttgtttgtttatctattaagatctcttttgccaggcagtggtggcaaacgcctttaatcccagcacttgggaggcataggatttctgagttcgaagccagcctggtctacagagtgagttccaggacagctagggctacacagagaaaccctatctaacaaacaaacaaacaaacaatcttttatctatttgtatgtggatgagggtgcacacactatgacatgtgtgtgactatgacatacatgtagaagtccaatggcaacttttcaggagttgcttctcttctctcacctatttttttgaggcagggtctcttgtttctgtcactgtgctacatatgtgagcttctggctgatcctcctgtctctctcttccatcttgccagaggaatgctgggattacagacaggagccaccacatccaggaactgaactaaagtcttcaagcttgcattatttacccactgaggcatttgggttgcccccaaccccgcccatatcattttgtagtcagtcctagctggaatcactgtgtagtcttgaatttacagaattcttcctgcctctgcctcctaagcactgggatgacaggcatcaatcaatcaatcaatcaatcaattaatcaatcatcatcattatcatcaccatcatcattaccatcatcatcatcatcattttggttttttgagacagattatctctttgtagccctgactgtcctggaactcactttgtagagcaggctggtctcgaactcacagagatcctcctgattctgcctcccaaatgctgggattaaaggtgtatgccactaccacctatttaaaatcctttaaaaaatatttatttatttatttattcatttatttatttatctatttaatatatgtgagtacactgttactctcttcagacacaccatggttgtgaggcaccatgtggttgctaggaattgaattcaggacctctggaagagcagtcagtgctcttaaccactgagccatctctccagccccaaatctttatatattttttaaaacagggtccagcatccttattttataatggccccacagattatatggttgctccctcatcactgtctccctcagccgactcactatgttttagaagcccttggcttttctgttacccaaatgagttcattacccatatagctagggcttcccttcccacctccaccctttacctgaatatgatgagaagtgaacgactaagagcctaccatactcagagtctcatggggctcaaggttctcatctgtaaaatggggctaatgataatgccagctccaggattcttcatggtcattaaatgagatgacgtctgcaaaacgtctgcagaatgcatacgttggccattcagtaactgctcctgtttcttattgctattacattcttatcagtgctagtaagcaaaagtagactctgtcccacatctagtctcatggggaaagcagaaaatgccacactaatcaccctgtatgtagatgtaaaacagccgggtaaatgagaaggacacacacttctgaccctgcagggtctacagcacacaggaagcaatctgaagctaggatcagaggtgatctaggacaagtcacaactctaatagaggtcagaaccagagctcagtttgcagctgcagtgaacgtgagactggtaccaaggtcattttgtttctagtagattgtctgtggtccatttaagaagcttcgtggggagcagaagtgacggctcagcagttaagaggacctgagtttgattcccggcaccagcatggtggcttacaaccatctgtcgctcctggtccaggggatgcaaaccctcttctggtttctgcaggcaccagacacacatgtgttacacaaatatacatgcaggaaaaacaaccacccataaaataaaatagaaatccatcaaaaaagaagctgccaggtttctgtgaatttgtttcattgcctataaaatggggagttccccactgacccccctggtttgtgagaaaccggggagctgagcatggaaatgaaggattaagctgcctgccatcactaatgagtctaagcctcactctgggcttcctccaccccccccccttccaggccagggaacgtgtgcagccctctaccctgcctccagcctgctggaaaagctgccacctcagcccgggatcccttccaagacaagtctggaacaacaaaggccacaggagccgttcttcctcctgggggctgaccgcccagtggctcctttatcttggcaagcaagctgaggaactgttcatggaaagagctcgtgtgaggcgtgtgggtgggtgcatgtgatctttagtgtgtgtgcacaaagctgctattgttgctgtccctacctgaatgggctgatagacctggaagtttgggtccttctcaggcaccctgatcatccctggtcttcctcacattatgtgctgggcagccaggagggaaaggaggcaaactttcttacctaagaatactggaagcaatccacagtgcttcagaaaaaaatccaggttagtagaggtgcatgatgacagtagggagagatgaaggagggattctatccttttagaaggggcagggcacgcctcaaccctggaccacttccccatacacacccaacagggccttcaaggactaagtggcttgcctcttttacctttaccttcagccctcctttgatgagccatctagaggaagactgtgcagccgaagcctctagcctggctctagtagtggctgctattggcaaaggcttcatgtctgttgtaagtctggcttggacttgaacagctttgtaaccctgactttagtcccttggactgggttggctggaaactggagatatgcaggcgggacttggcttggcctggcccttatcttactttccctcacatcagccaccagaagatggacagatggggctgggttgcctgctggagggtcaggtctgttggtagtttgggaaatcctaaatcagatacccagaacagacattttcagggctctcttcagtcctaatccagggcaagagcctggtactccacgcctaaccacaagccgacagggatggggatcactgatgcgttttgtaatgcagtgacatgacgtggcaggagggggtacctcagcaggtccatgttgagacccccccccgaagtatcagctatatgatagataggtctagtataatgaagtttatttgggggcatgagaagggaggctgagaagggtgtagaggcagagaaagagaggagacagagaagggcagaaagagagagagagagagagagagagagagagagaagggaagagagaggagagagagagagagaagggaagaggctggttgggaacacgtggagagagaggggtgaagatagagaaggagagagagggagagaaagagggagggagggaggggagggagagagagagagagagagaaagagagagagagagggaggtcaaatagtcctttttatagtgagccaggctcctacctgactgttgctaggtacctgttgggcggagcctagaagtaatgctaataatcaccaccttccaccttcctgggcatcctgctttagggaagttctttacactaagctggaacgtacacacacagtagtcttcttattgggcttgactctgtccagttcaaggaccatgtagaatgtgtctacgcacagttttgggacttgtcacaagactgtaccagatggggtctcagatgctcagtgcatcctttcccatgtgacttgtggctctgctgaagcaaacatactgagtctttggatcacccactccaggaaacactgcccgtgggtgtgagacggtgtcccttccttctcctgcccttcttggctacttaggtacaattcttggctactatccaggtgaaatccatgagcaggccttggcttgggacaggtcctggttcagagttagtgtccagccaataccaaacttgttgaactaaatcggaatatccatgtgagggacaatcaatgtccaggtccctggtgaacttggctcctgtctggccttgtcctgactttgcaatatggccttgggcaggtcctgattctttctgggcctctggttcttggctgcaggttggatagagccatctccacatgcctcagacaggcttagtctccaagtgtcttgctgaatctttttttcttctgtacaatgatcacccccaaattccttcactgttctatctagatctctgcccaagccgggtataaacgtggatataaatggggcttagaggtgcatatgtagcaaagttccagtagtgacttgataaagcaggtcaaaggagtctcaaaggatggcacttgaggacaaatgagtctgtctgtcccttctctaacctgtttcagtaggacagaggtcacattacagtccccatttctttctgagaacatagcattatcctagcataggctttagctttctcttttcagtcctaaccatcactttttagtgtttagggacgacacatcggcctgcaaggtaatgggagtgagctaatagttagtggccatcattcttccacaggccagatgcacgggtaagtcagtggtaagcaggatggagtccctggtactaatatgcttttgtactgaagaggattccgacagcaagcagatgagcaatcaaatagatacgttcgggttgcgggttgaaggttatacggactcaggagatggaggcgtgaagactgagtatgaattcagcctgggctaagtactgagaccttgtctcaaagggaacacagacgataaagatattaaaacagtgcgtgggttcagggcttagctcaagagaccagcagaatgaccggacccacagttagagatgaacagacagatctacagccaggtaaacagaccgtggggagagaggctggtccaggcctgcaggcaggatggaagcttcagggacagaaagaatgaagaagggaggcaggatctattaagctgatgactccaggccttaatcctgtgccaggcccattcgggcagtgtatgtagggggaggggagcaccccccgctggggtgtaatttcacgctgaagggcctgatggggcatcccatggactgatcctttctggatcagaaaacccacttccctttgtcgcatgcagggcgattagcgccttaaccctttgtaggctggctcagggccagttctgccccaccttgcctcctgtccctggggacctagcccagagtccttctttgctctcagcctatccaactcttagatctggccctgtatctctgtgtgtgtgaagcttcctgagtagggaaggcctaagaagaccagggaatagattctagaacaatttctgtccatgtccctgttctctggcaccctacttcctctgactgcttttactgccagcaaaatggcgaccccatatgtggggtcctccttttattacattttaatttatttagtgtgtatgtgggtgggtgtgcgtgcatgcatgccacagtgcacacgtggaggctaaaggacagtttgtgagagtctttccatcatgtagactttggggatcaaactaggggtgtcaggcttcgtggcaaacccctttacccatggctctgcctcagtggctctgcaggtgcggcgcctcttatagctcagttcagtccacactcctccaagaagtctaaagtccagtttcctcccttgcttaactcaaaggctggaaacccaaggccacacagtcttcccataccccctgcactggggaactcactacctctcaggcaataaagccagaatcctctactcccaatgagtctcactgggagtgaccattgacccttgaggccaatgaacactcacaggccatgtgtcagtaccatcccagagatacccctggccagttcttctaatagtgacattccaggactaagtaggccatcatatccagccccctgcatttatggtctcctttgctgataacctcctctttgtgtctccattcaaaggcccaccaggaagtggtctcacctttggctctgaatgcccttgcacctttcccaggctaacttcaacatatccaggggccactcccctggcttgggggagaagggcagggaccagacttggcctcctttaagctccctgggtctctaaaaccccagtcccattaaaagaaagcccctaaatgttatttacacttcggagtcttaaaaaccattaacaaaagccacttaattcaattatcttcccggctggctcggttctcagcactgagcactggcctccccttgccacccctccccacacccccactgtcattgtgtcgggctaatgaggtaaactgaagcgagcctgtcccccctgacaggtttatgagaatttaataaagcgtggccgggaccaaatgagttgcctcagccttggagagcgcattgtcttcagcgtcagcgttttttgactcaagctgccccctcccccgccccagctcttgcctggctcagccccaaccctcacccttagtacctccctaggtaaacccaaagtcctgtgtgcctggcagaggctggtgtggccctgcaagggcagagctcccatgctagtccctgagaaggacagaaagtaaatctatcagttgtccctgggaagtgtccctttgtgggcctgtaatccctagcacacatcagaccccagaaacagacctgggggacttctgctcatgtactatagcccctgccaacctgaggctaatttgggcaagcctcactcttttctcgcttgtttgaagtgaccagccaaagggagcttcccaaatgagggtttttttctgcctgcaagggcacatggtgggttctagggtctccatgatggcctggactccttctttatatggattgtcatctcatgttttcaatgacaggtagcagagggtggagcccaggaagcagcagggatttgttcaaggttccaaggttgtcataagtgcagatgggagaggcttctaggctagacccaccctggagcactgtgacatcctaagaaggccgggtgcccttcttcctttatatcccagctgtcctagaaccagcctttctctgcttaccctgtcagagacccaaagacgtgagcttcaggataacccagagacctagaattcttcttatctcctacagaagtggcgcgaggaattactacctgtggggatagaagctagacctgaaaggagtcgtagcatatcttcctatcaatggagtatcgggagagcaaggcttagtgatcagtgagtgtgattgtgatgaaggctcaatcatgggtctatgaccagagtcagattggattttgtcagtcggggctcagtaaatggactgtggtcagagctgtctgttcccagggcttgagctcagtctataaccaaaacaagagctagtgtatgtccatgatcaaaactcagtttgtgtctaggtcctagttcaatatataatcaatgtataataaaggtcggggaccagagaagttgttaataaagaccgggttcagtatactgacaaagcaggagcaggactcagagtgtaatcagggtcaagttcactataaccaaggaccaaggctcagtatgaaccaaggtgagggttcaagatcaagtctagggttcagtctacaacaggctcaggattgtgtgtgtgtgtgtgtgaccttgatgcattttattttcaggtcaaggcttcctcggtagtttctggttgtagaaatggataatttacttagtacatctaggtgactaacctcctgcccccgctcccctgctttccctgtcctttggggtctttggccttcagaagagagaaaaagaaaaaaaaaaaaaaaaaaaagattgttcaggaggctggaatcccctgtcatgtactcagggtgccctctggtggcagtctctaatagtgttgattttcgcagacttgaccagctttcgggaagcctaggcttctggtatagttatggaagtccacttggttgtctctgtgctcttgcattactgcacaccacccaaacaggaatagacacagggggatctgcaagtagacagtggacacccccaagcttttctcgtctcctgtccagttggcatctataaaccctgataccagactagaaagctacgtctcaactgtatgatgggagtcgcttcctttatccatcagtttgacaggtatcatcgtcacctacctttgacaggtataggagagaacataataaagatctccacttcctggttctcactcctcttcttagtcatgaactcctggccacagcacccatagaagctcactggcaccagctgaaggttcgcagaagttcagaacatcctaggatctattctccaccagattaacaggttagactaaactaggtttgaggtctctgcctctacctgtcctcatatgtcactacccataggccagaggttcctacgtttacataccaggggcctcttttccagagcctgagaacccaggtccttcggggctgctctgctgggctgacagctactaaggttctcccagaatatggcctgacagtctatacccaaatgctctaggcaaaattttagcacttcctttaagagtcttttctttccttccccaggaaatcagcagacaacttgtcccatttccttcagagcacagtgtagctgcttgcagtggctactccagccccagccccagccccagccccagccccagccccagccccagccccagccccagccccaaccccagccccagcccctactcaggtttacagtaacccccaagcctgccccttgttttccggctctcccttcgatgctgttttctgcacagcaggcagggaaatctttacaatcataaaccagatcttgccaggtctctgcttaaaaccctccagtggctcctatctcacaaagaataaaatccaatgtctcactctgtcctcaccaagcttgccgtgggctggacaacaaccccttccacacaacactaacatcactccctccaatctctattgcccttctctctcattttgacacaaagaggccaagttcatacttacctctgggctttttcaatgaccattttctgaacttaaagcattcctgctctaccttagcatggctgactcctgtcactccattcagaatttagcttctctcagagaccttccttttttttttttttttttttttttttgtctcagagaccttcctaactgcccatgttcctgagatatacctccctactgtgatttccagtataggactgtttactggttgtctcctagttgtgtgtgtgtgtgtgtgtgtgtgtgtgtgtgaacttggcatatgtgcatgtgtggacatgggtgcccatgcatgtgtacacaggtgcagtggccagaagagaacatcagatgtcctgctctgtcactctctgcccatgctcttgaaataggacaccttaagctgaatctgaagctcagttggtggcctgcaagccccactgatactccacacccagtagcagtgtactgggttatagacccaagggcatgcatggctgggctcagccttttccattggttctggaatctggtctcagtccctctgcttctgcagcaagcactactacctattgaaccatttctctagtcctgtttactgtctgcttccccaggtagaatgtataatcccagtcctgggcacatggtaagattcaggaatgatctgttggattcatttataaaaactggctctcagtggccaccctcatttcttctagtaggactagaaggaagacatcccagtttctgacgcctatgggttccctagttcagtcctgcagcaacttcctctgagacgcaggacttcctagagcaccccaagttccccatggcaaatcctggggagcactatcctttcaggaggatcagttccgtgttcttcctgcagctctgtacctctggggatcaggtgatcaggttagagggcttagtcttctgctgtgccccttgcaggccttaccaggctctcaaggactcctccagccagggagcttgctgtcagaatcccatcctcctcttaacagaaacagctgtccagtggcctgcctgcgaggggcctgcagaggtgtgagtgtagagctgttctttggaaccactatatatatagaaaatggggctgctccaccgtctcactggttatactacactgaaagggtctgtcccttagctctcactggggagattgtataaagggaggcaaccctgggaggcaggtctggagacctgaaggtgctttgctgggatagattggaaagtgagcctcagggcacttgcgtgtctgagaagatggagtgcattcagatgaaagaaataatcatcttcagctagggtgccaggaaggggctctagggagccaatgccctcatgctgttttctctcacaagtctgctcacaccactgattttcgatccattgttccacttaccggactccttatcttcctcctctccagtagctaactccagaacaagatcagggaatcttcttgcgtgggggataaagagccccgagggtgtaattcagggcatctgtcagctgggagagggctaggcctaacactgcagggtgtagaagggtgtcacttcatatggtgttaggggaaggcaggtccagatcccacttaagactgcatcaatgggaacctctctttctggctactttcaagaaagtggaagccgttggtgtttgggatggcagagcactaactcagaagagtgtgagcctgggaatgaccacaaacacacacatgtgcatacacacatgcacaccaacacacacccaatagaggtgtcaacatgttccaagaaggggccacgtgttccaggtactgagtgcttcaaaggtcagaccaccggcttgtatgaacaaatttacttgctggtaaatttgctttcatttagatccctgggagacagcaggaaaggaggacaaggcagcagatgaaggaaaaaaaaagggccctagggctgttgggaagtacctggtcctcagtaaagcccagcatggacagagaaagaatgactgataaagcccagagtggctggccaaggagttaccactgtcaagggaatggtgggtcagcatggccagcatcagttcttgcttgggtacctgaaatgagaaggggggctagctcagagtcacagaaccttcccctagtcttctgttccctgtgccttcttcttagggccctccttctatggatatcaggagccctcatccatgtgctcagatcacaggctgggcccaaacatcaagcagagctaggcctgaaggtctgagctttgcatggcccttggagctcctctcccttccctgtctgtgctgggtggctacactctcaactgctatctgtaatactctcctacacatgcgtgatgtcaatagttatcttaaacagggacatacgtgatccaagcaatcactcctgaccccacccagccatacatctgacagcttctcccagggacatttccaggtatacaggatctcagagaccatcttgtccagtcacacactcctctcccctggaatccctttctagatctccgaggagggctggtgccaggatgctggtgtttagctataggctgccaccattccaggatcctggtgttcatcagaggccccctcccccacctgcacatcacagagtactgacgcagaaggtgctttattgagcgaggcacagcattcgcatggtgtggcacagtcatggcggtgggtgctgccaggtgggtgttgctagcagtgaaaaaaatcacacacagaccttcaggactgaaaagactcctcaccagggaggaccccagcctcagctcctctgacctttgtcagacagaaaggatgggtgtgctctatctggcttatcccagggaccatcctgaagtcagaacctttgttccccaattaaacctaaagggtttgttagcctagcgacaaggaggagaaaggcaggatggctagatgcctgccacagtgcacagggcctggtagagctagctcgaccttcacccctctttccactctgatggccggccgacctagatcctctagattgaatgaagttccctccataaagctcaaatgccacagggagggtcagatttccagatccagggtccagtctaatcaacgtgggaaggaggaggggagggtgaagtagagtttagagactccacctaaggggtcaaagctctgctctctttggggtgtgaaagccaatcccatcagtacactctccctattggaagttctagagatggtacagatgaggccatttgtgctcagtcctgggccttccctctcccctacagcagcctcccctccccgctcctcgtggcccactaggaggcagccgggtcccgagggaagttaagctgcgtcccttcggtgcgcggcaagtagggggccgcggttgccggtgcgggagggtccagggcaaagaggccggggccggggctggagcggccggaggatgcagcagaagctgctggactgagctgcaccgccgtggtgtcctgtgccgtgcgctcgctgctctccatctccagtgccacagtccctggacgcccgccaccctgacccgcggtggcagaggagcgcgcgcggggcacggggccccggcggctgcacacgcagcaggcagcaaagaagccgagcgccagcacgagcagagcgggccccaccaccagaggcacgttgtgtcccggcaagaaggcggcgaaagctcccaccagtgtcacgttcaggcctgccagcagcacgcacaagccacaggcacagcatagagcgggcgacggcaggctacgcagaaggcttcgggaacggcccgggggcgctggggccagggtctctgtgctcttctttgcttgcggcatcggcccgcccacaccctgcacgggtcaagctctgtcccgctgcctgaccagagtggcacacatgtcaggggcaagctctggtgatcctgctggcacacagtaagagagtgagtgagaagggaaggagcttcagtaacctccaatctgggctcagttctgtggctgcctgcagtgtcagcaagttgcccaggacatctttaacagccctgggaagcaacccatccaatgggaagaatctgcaaattgtttcccccacctgtccatgaagtcccccactgctagtcttaccctcacctctcttccaggaagtgttcaggctgtaactaagagactaagtgtgtggccagagcaatgacttagcagtcaagaccactcactgctcttctccagatcctgagttcaattcctagcaaccacacacggtggctccgtaacaggacctaatgccctcttatgtgtgtctgaagagagggacagcatataaatctttttttcttttcttttcttctttctttctttctttctttctttctttctttctttccttctttctttctttcttttttaaagagagactaattgtaaagtgcaggtcgctggttaaacgaacccttctcctcttattccttagtcctaaggaaaaggcagctttgggggtttaaacagttttcccaccctccaaatggttgaggcctggggctaatctggtctagtttcttcttgctcagctgaagaaaaactaaagcacggagatatctagctgtttacctaagagtcagactcaggatctacgagacctgctgcctgccccacactatgctctggtagacacagcagtgataccaactctcctgagcatcagatgaggctctggtatgggtggcctgtgaacgtgaggaagcttctgacattcagctgagggtgcctttccccatgatctggactcctggccccttgctagacagtgcattctagtaaattccagggcctctccatttcaccacctagggctctgcagctggacttagcttcaaaagccttatctatggggccgggagcaggatggctcagtaggtaaaagtgcttgctgcccaaggctgatgacctgagtctgattcctgggacacaagtaaaccatccctgaaacaagcaaaaggccagatgtagggccaacatctctaattccagcacccctattgcaagatgggaggtggagctcactgctcagctagcctggggaacacagtacagaggcagaaacaagagagactccaccttaaagcttaaaacaagagggtaggaaagaaccaagtgagaagttgtcctccgacctccacacatgtgattagcatgtacacacaaaacaaattaagactgaaagtccaatctctgggtgttgaaatccctttcttgggatctctatatgggtctagttctgggaataccactggcttggtaaaaccagatctatgcagaagcaacaacaatatagtcactgtgtcaggatgtgacttctcaaacaaaacaggagcaggacacggtggcacatgcacgcctttaattccagcacttgagaggcagaggcagatggttctttgtgatttctaagccagcctgggctacatagttagactgtctcataatcatcaaaacaaccctcaaactccagcatttatgacttgtatttgggaattctgacttataatatgaggtcacaggcatcaagcaggacctgggagaacatagtttgtgagctgtgttgaaattgtggagcaatgttagagataggtcctaggtagagaggtgggtaaccaggtggctccgcagatggcactgcagagagagaaacagggaaactcacactgtgctcacctgggaggagccaatagtgccctcttgacctcttgacctccttctgttgctgcagtaaaatcctcctggccctttgtgtctcatcccagctaaagccctcaagcccagcacagagctctgaagagtgaattgtgtgaactaaaagaactttgctttagtgactcctccaagttgtctggtccatggagatagcccagggttcatgctggcaattaagcccagggcctcaagagtggaagtcacatgctctacagctgagctagatccttagttttttttttttttttttaaacatggtgatgctaaatttctaagctgcctgtggtagccttgaacttgtgacccttctgccttacactcacaaggaggtgaagttacaggtgttaccaccgcattccaccaccaaggcctctatagaagggagaaattgaggctgggaatgagaaaggtcatggagggagactcttgccaaacctttcccagcacggacaggatgctgatcgctgatgtctgctacccatgatcctggctaaacagttccctctccctgccggcctgcctctgtccaggaaggccttgtgatctctgtctgggaatctggtgtagaagcttttggggaaagggcaggggaagaaacttggggttgggaagtaatcaggtttgaattttgagctgacagacaacttgaaatagctgggacctctcctcaggacctggacctgagctgtctgaacataaaaagaaagggataggacgggtgatggttatctctgaactgaggtctcttgtcaacctgccccatgcttaacttcctgaggtttgtgaaaataaaaataggtgcctgtttagaaactcctatcaaaacatcacatgtatcataaaagaaacccatcgaccagtaacatgactgtgtttaatcatttctgtaaattctttcctttgggttgaattaagctattccctaagaagtcaccgttgcactcgggttctgattctgtgtacacgtgttagcatttagttcagagaaaatgttatgttcctcagatcccacacacacacacacacacacacacacacacaatttttaaaaagtctatagctgagccatgtggtggtggcacacacctccggtatcagcacttagaaggtagaggcaggcagatctcttgagttcaaggccagtctggtctatagaatgagttccaggacagccaagactatacaactataccaagaaaccctgtctcaaaaaaacaaaaacaaaaacaaaaaaccaaaaccaaaaccaaaataaaacaaaacaagactgcagccattgattgtaattacccaggtaaccattagtacctggggtggtcatcagtaggtggagctaagagctagctccttgaggggaagtttctgcctgaagcccctatgtgagcctgtctcctgctctaagattctctgggtaaaagcctcaggacgttgacaaagatattagccactggctctgccttgtctcccaccagtctttttgctcagtcaaagcccttgttgtcccttgagtgggaactcttttttttttttttttttttttttcttagtctctacagtttgtgcgaggcctctcctctggaagcccagactaatgctcactttatcctcaactccacccatcctcagggaacctcccccgttgctgttactcattgcctgctggggcttattcattacactgaaagttctcagctcttgccaaatggattctgcctccccagggtccagagagacaccatcatctcttctcagttaatggctagaagttttcccaccctctgacatatgcaaacacacacacacacacacacacacacacacacacacacacacacctagaaataatgcttgaggaggaggacgtttggaaggcctagctttctagtctgtgtgtgattcctgggctctgtcatcccatctttcagtgtgtgacacccaccgccttcactcattacatgcacactcatggaccaaacataccccggacactgctgcactgcatgcagaactgcagacacgggctgacatattcccatctgatggagatgagcttctacgtagcagttgtgtctctagacacctcctgcttggtgctggtggagggtgagtgaggggcctgagaacagtgacccaggagaggtcatggggtgagggggcgggggttctgattcagatgctcccacgataccttcctgcttacagtggtcttcatgcctctagccagcaagcagttcgagaccccatcatgggccatttcactgtcacacacctgcctgtaaggtaggagtcacatttaaaaggtctccaacagacttcagaggctctcattgtagcacagtagatggcccaagggacaaaggactctgcatcagtcacatccctgtgtccattaggctaaccttcatatccatgcaggcaacagcggctcttttatttcctctcagttcttcctgatgctctcagatgtgttcctggtcccaagccaggggacatgcatgggcagacttagtctagacctctgcctccacaacagcaactcagctacctggagcaataggagggatggttggtagggactttagactgctggagtggggctgtccttccttcagctccttctgaggcttggtgtctagccccacttatccctcctccccatcctagcttgctgaggtcctgcagtcctcctgacccgtgctcccttagttctttgacatcttatctccattgcccagttccttcaccccatttcagctgccctgctcccatggtgacctccaggacttcatctcccttggcattaccctggaccagcccaccttggagaggccgtatatcgtgttctccactatccccctacttccatcacagtaagactctgtcagcacctactgtgtgcccaatgatgttccaagctgttatggttcaaatatggctcatctctcccaaactcatgacaaaatcagatttcttagtggtagggcctgaatgtaaggccaatcacttttaaaaagtgattaggaggactggagagatgactcagtggttaagagcaccaactgtccttccagaggtcctgagttcaattcccagcaaccacatgatcactcacaaccatctgtaatgggatccaatgctctcatctggtgtgactgaagacagctacagtgtactcatatatgcataaaataaataaatatctttaaaagcaagtgattaggagctgagcaaggtagcatatgcctgtaattccagtacttgacagaggcacacacacacacacacacacacacacacacacacacacacatacagagtgagattctgtctcaaaaaaaaaaaaaaaaaagttagggaatataggccagcctcttctcttagacttcacagtctccagaatagtgcaagttactgtaagttccccagtcttaggttttgctataacattagaaaatggacaatgatataaaccctttatatacattaattcatttaatcccacgacaatcctaagaagtaaacacatcgccatctcttttagacaaacgagaaaacacagattccggttatattaattatccaaggtcacaacctggtggtaacacacggcaaggcccagcctaaagtctgggctgtgttgcccaagtctgtacctaagccactgcagctccaggattgcacactgcccctcgctgtagctgttttttggtggctagagccggtcccaatggtcctcatgcctctgatcctttctctgtccaccttgatccacactgagtttacgttagctacttttgtgatttttgtctcatctctctatcctgccagtgctgaccagtgaagctcaaccctgttgcagtccagcttcctgccttctcaagtcttcacccaaactcttaagcctaggagataaaaagaaaccttactgggtatcaccagtccactgcatgcccgcaactgcatggtcgcaactccccttccgggcctgagtgagagtctcagtgggccatacctcctcctgggaattgttgcctatcccatcttcaaccaagccagtcatggttttgagctagcggtctcttcccttcttgaatacatggcctacaagggccacgctagtctggtttctgtcccatcatgttcctgcctctctatccatcattgtcaccagtgaccccttgtcactgagcttagtgaacattgttcagcatttactttctgcttttgaagctacctgagccatacttcctgggaacactgcctcttgatgtagatttctttactgttgcccttttccacaaaggttgcaaactcaggacccaagcttggccctggtccctccttcatcctcaggctccctactatacacctgcaacccctcttgggacctcttagatccctgccacggatctttgcagtccattcttttttctcttctcccagtaattcaccttgttcatcccccatttctcattgttaaacccgtcctggaccctctgctgctccctgagctcagactcctccaggaagccctcttgactcttctctgctggggctgagctcaccagcgggtctccaagtcagctctgtcctcagctagttcccccagctctgccttcctgtgcagacggtgtgccactcagctcagggtcccctagtcatagggcttcctgtgtcgaggactgtaggcccatcgaggtacctgtctcttctcagtgctccatgattattagcgacacaaagggaaagggaacactgctgggagaagccagggaaggctgccttccgggcttcacttgtctctcagatttggagttgctatctgccagcttctctcagctttgggcattggagaaagcaaaggaagctacagggtagagtcaactgttaagagcagcagggaccagggcagagtaggggagtcatggcagccaatctgtctcctgttctcttatcctcctttctcttttaaacttgttttctcaagaccagaggtcctggccccttgtctggtaccttcccatctctcggagttcagagcaggataagcatctccccctttccttcagcaaccctcccagagtccttgcccactcattagcaccctcttcccccatttcctgcaacttcacttgcctgagagtgtggacacttccctgcagtgaccctgctggcccctgaggggagtccaggtgtcctgtgttagaggggttggtccagctcgagtcgcgggatccgtgcctcgcctgggagagctggatcagccaaacgacccaccgcgggtaggggatccgggagaagggagatgagcggtcagttcctctctgtcgactctcagcggcttcagtggagaccgtggcagcatcggcggttgagtgggaggcagcggcgcggcgcgggctgggtcagcagagcctggctgtggtctactgcaacctcgcgctgcgggcggagccccttcccagtgtgggctgccaacctcgtcgggctcccaccagttgcctccagccgagaagcctcgcacacgcccttctcgccttcgctcctttgagttcgtgggttgtgagcaccggagcaactaattccccaccgcccacgctgtctaggctgtagtttttcccaccctgcgtggaaacggtgcagctcctttcaggacgcccctgcctgcattctctagcatttctgcagccctagtacgagggagggggagacagagttttcccagaggtgaaactttgttgttggtttcagcaccactcccctaattagccatgggcccagcactctagaaaggggcgtggccacgtgtccctaaatggaagtctagaggcagcttacactggattttattgcagaggcctagatggacatggaagagtatggctggaggacatctctgcccactgtcccttcattcatccattcacaaatccacctgatgtgtctacagaggatgggccagtgatgatctggcacagccgttaggcccaaggctcccagcttcttgctctgcccctggaggcctgaactaagatgagagtctcatttccacttccttagtgagccattctccttcagagagatccagtgagggtgtgactccagggggctacctagatccagcatcacccagctttggtttactgctgtgttctctggaccagctcagttatggcccagggctcaggtgttgggacttctagaaagacccattttcctttctgagtagactcctggaagagatccccttcccactgtccactcctatatccattaggaccactggagcgttctgttgctgctcaagtactaaccaagaactacataaactactgcaagcttggcccacctcctctcttctccaaaaggaccatgagagaaggtttgcctcacaggggccactggggaggttgtatctaaagatccacgtgcgctggaggaatggtttcagaaagctcacagcagggaaaagagggggatggtaggggaaggcctccagaactcccactcacctcaagactctgccagcttctccaatgaatgtagctcttgcttttttcctgtgattttattttaatttattccttaatggtcacaaatacttgtttatgcctggcctctcaggtatcaggcttactgtatcctattttagggttatcatgcctgggagggtcaaatagtcaggagccaccttatccatgggcttaggatattatctgctattcccaccatctgcctttgggcatttctttgaagcacagaggtcaagagtgaagacaaataggaggaaggggtgttccttgtctatcagggaaggggtgggtggtgatggggctgagaaggaggaagagacaagtgaagaggagcaggcaaaagtggggagaaagctggaggaaccagtctctacagctgaccagcattggtgaaaaatcaccccttgtggatgttagtccattgctggcagggagctgagctctgtggctatgcagagaggagacctggaggcagagcttgtctccatgactttttctgggcacctaatgagtcctttatcctgagatatctcagctttctcatctgctcaagatgggctctcccatgtccctgtttcccaaagcctagctttctgctctcatgcttaacaaagagaaacagaccacagccactcaagtgaccagctccccttggaactactggagcaatgtcagagaaggcttctgagaagagtcatctgcattggtcctgcaagaataagactgtttccagtttgttttctcaaagcaagacaaggaggatgtctgtggagatcagacaatattgctgttcctggagctaaaggcatggaggctgtggcagccttctgctgggcatgtgcacctgaacctccctacctgaaaccttgctgtggagagaccagaatgtacctccccaggaaagcctagtgggcaggttttttcaacctaatttaagccactagcatttgctgagcagccactatgtgccctgacttgtgctggggattggggggggcatcactcatcatatttacgtaggcttgagaattgattttgtgagcgctagggatagagctgagtagagtgattgcctagtgtgtacaagaccctaggttcagtacgcataacagagaacacataaaattgctaactttagctagaaatcattgaacacataagataagcttaggctatgagatcctgtcttaaaacaaacacaaatgtctttgtgaaaaagaattcaagccttgctggaggttctgagagggggtggggtggggtcacaggctgctagaacaggacatgggagccatgtagctatggtattctgagatagccttctagagaacacaagggaccttcttcttgcaaagaagattgggaagaataggagatggggtattgggagggctgtgtggagccaggtgcttcacagccctgagtgaagatgttcaatagcaactgtgccagcactggacttatctggaaagttaccttgtcagtgaccatctctgctcctgacatagacatgacagcctcagccaggacccccgtatatggctcctgtgttcagcttctatggccaggataaaacaaccatctttgactctagtcaaggcccttgatcaaatttcaataagggatcaatgaaggaacaaagttgaggtgttgtccagaacaatgaggccagggcaaaggggtcctgtgggtctttccacgattctgggagtgaaggaatccgttagggagagcatcactggaagagaaggtaggcccagcattcccagggctcatttccacatcgtccagcttgaaggaggaccccgagactggagtgtggggagtgggaagggtgcttagccctcctcagttccccggcctccaggcttcagcttctccagggttctggtcactgtggacaggccgctgcgggctcctggaagagacagcaggatagggatgcctgagtacagacccctactgagatgtcagatcagaaagtccaagaaagcagggatcgggatgctccaggcagagctaggatggagagggagatggggagtcctagggaccaagtacagtgggaggagctgctgcttcagccctggtcccactgcctcccagatgtgatctcagatgtgtcatgtgatctttctgcccctcagttaccccataccaaaaaaaaaaaaaaaaaaaaaaccaaaaaccaaaaaacaaaaaacaaagaaaacaaaaaatgaagtttattgtagtacttcccagcatgctgtttgtgagagccaagctgttaatgcaggtaaaatggttggggcagcatctggaatggactcttctgctcagtaagctctaggagaaggacatatctacatatggggttgggttgccttggagacactcccccctgggtttcccagtgtggagaacagggtcaggaagggagaagatgcctagtttcaggtattatgccaagagccacatttcagcaccaggaggagagtggacagtaaccagggcatgaggcccagtgggtaagggaagagaaagcaggaggcccccagtccaagcttggcaggacagggaaaccctaaagacaaatgagaagggcttgcacatatggaagctgactcaacatcactgcttcgcttggttggggacccctccctgcttatgaccttcagggctcctcccaggacctacagagctgctccatcagatagcagagacaaaagatggcattcagaacgtcgggcacttaccttctttattgctgttgttgctagatcttccctccccatggtctggtcctgagttaggatggattctcaggtttcctgcaggatgagagcaccccaaattcccatctactgggttattcccaaatcaagcctagctcttcctgttcttcctgttgtctaatctaatgtgttgccacgggtgggtggctgtctctgctctcccgtgctcctctaggtcacattatcgaggctgatttggggaagggcagaagaaacaaatccttgaaaaagtggtagtgatttttgttttgtttttgagatagggtttttctgtgtagccttggtgttcttggcatctactatgtaaaccaggctggcctggaacctgctctgtagaccaggttggccttgaactcagagatctgcttttctctgccttcttagtgctgagactaaaggtgtgcgctgccacacctggccagaagtgttttttaaggagggaagtaggtgtgtgtgaagctgcataggactgagggtgttgggagtttgggtgcaggctgtggaagtcaggtgggaactattaagaggttgtgggacccaaggcagaagagggtatttattgggctggggatgagagtgtcatctgtagagcttggagactttgggaagcaaaacgactcttaagggagactgattcctgaggtttagccatgtctgctcaggcagctgctggattctgctactctgtagccatggtgacactggcatagaacacacacacacacacatacacacacacatccaggagcagtctcacatatgggcatgctcactgacagtcactcacaggtttgtacacaaagggtttgtgggggaggaaatgctcacctatggcaggtaggatgtggtccaggttgaaccgagccttcaggaaggggtaggcgaagatgaggagccctgaggagggacacagaggatgctgtgatggggaaggcctgattggtgtgagatgtaggaggtaggggtgggtggtttgtttatgaaggtgatgtaggaggcacagaaacaaaggatcagggactgtgggggtgcaaattggaggtgtgtgcgcgcgtgtgtgtgtgtgtgtgtgtgtatgtgtgtctccccagcactcagctctggatggggattcagtacctatctggggaaggagctacatgctatgcaggccacaggtttgcaggctcttggctctaggctctgctcaggtaaagcagattggtcacttaccatccttggctagaactgggccaggtaacaccaatcccactgccccctccccttccatctccagctctctctcttccaagacctctagtgtggccttctaggctccactgctgctcctctccactcaaacctgatggtcaggaagccacagggaggggacctgccctgctgtcctcccagattgaatgctcctggcattcagtgtttaaagatatggagcttcaggctctcctgggacagggacgtagggtgagaggtggcattctacatcaatgggcctgaccaggacagacagacagacagacagacagacagacagacagctgcttgctgttgactcaatggaggagagtcttgtctgagctgtcttgttttacaggactctatcaccccattccatctaggttgatgaatcctgctacaaacgcaagatcccaccaggtaaaggtgttggacaccaacccgtcttcccttgccctcccagcacactcactcaaccagcccgcagccagctctccttcctgcacgccgaggctgcactgtttataacttcttaggctttcattctctccaaccactgaccagccaagcccttcacctcttattcacctcaccagacccctgcttcccagaaaaatcccctccctctgcctcagcttgtgtttgctcaccaagcccagcagcaccaaggaagataccacccacagcagcagcagccttggacacggagacaccgatgatgatgctgccggccaccaggccgagggccacacaggccagctgcaggcagcggaagtctctggtgctgatggggatgtccatgcaggtctaccctggggcgctgcttccaggcctcctgggagtcttggacttcttggatggatgcttccttgttgggacgccacacccagggtggaaacttttgggctgtaagtctttaggccggtctgggcctgggatttatctgcaaccttatcccacagttttccaggggcccggaggcctagcttgacctcaacaccccagtttactcttccttttgtgaagggctctgcggccagaaaccactttgggggttcctgcctggccacatttccactttggccagggttctagtgacgtgggtctgcctcatggggtcctcctctgtcagctgtcacctaggatctcagggagctgggcccaagttctcttgctcaactttgccagctctgtcgaccctgctcagttgccttggagcctgggcctattaaagtttaaagaaatgcaaggcgggggtcaggggcaggcctaggaaacaggtttctcggaggtacaggcagcaagcaggtgatgagttattcatgagcctgcaatatgagcttctgtttgcatccccagggtccagtgggcaggcagcctaggttccactgttggttcctgagcaggaaggctgggcttatggcttcgtatgaagctcagagggtaaggatgtgaggagactccccagtcacatgctcaaggctgaccctgctggtctctgccccttggcgtagcggtgcacctggggccctgcttggaaacatggaaggaggggtagtcctccaggtctactcttcccggtgcctcccatgcttctccaactgttctgtcagctgctgggcctaggtaaggctgagagctcttaacctaagccttgatcttaagacatcccatttatctcaggtaggcattggtaccaccccatttaagcttctagtaggaggaaaggctaaaccctggcaattcctggctgggaagagccagctgggtagggtagggctggacagagggactgggcaagaagtgtcatgaaactgggacatggtagggaccttttagcttgaggacctctagccagcctggctgacatggtcatcctgtttggaggaccaacccaactaagcctgagcagtagtagcacaaacaagtccagtcctgattcccatccctctttcctagagcctagctccaaccctcatcaataattgcattccctgaatctatatggatcagggtattcccagtcctccagcacagacctgttcccttctctaacctggggacacttctcaaagccacattaccctgcactgaatccccaggcctcccttccattgctcatttctcactaccaggccttcggtctccatcagcctcacaatcccctctctccactgcttctccttcctcaagctcttttttccttctccctgctgagcatttgcctggtgcttgctgtctagtaaacctctccttgtccctcaagacctacatggacagccattcctgtgcagccttcctgaccatgcctgggctgttctgccatcccgc

SEQ ID NO: 897 - DNA, 2300 bp, Mus musculus
atggcagcctcaatgcctctggctctgtgtggagcaggctactacaagaagaagctcatggtcactctccaggcctggggtggagctgacaggttgtccatcccagaggagcatcctggggaatgccagagggaggtggccttgggagctgttaggtttattcattcctgcaactcctgggactgtttgctgctgaccacatttgagttcctcctctggatttgccctcagctgctcccccaagaccatactctcctcaggcttctcacagaaggaatggacattcagactgactgtccctgccctgtctctggcatcgtgcaggcaggtgaagaagctaagactctgtccagctccagtttgggtgaatgttccctcttggatctaggggtggggcaggcggatgccgccatgcagcactatggggtgaatggctactccctgcacgctatgaactcactcagcgccatgtacaacctgcaccagcaggcagcccagcaggcccagcacgcccccgactaccggccatcagtgcatgcgcttacgttggctgagcgcctagctgacatcatcttggaggcccgctatggctcccagcaccgtaaacaacgtcggagtcgcacggcgttcacggcccagcagcttgaggccctggagaaaaccttccaaaagactcattacccagatgtggtgatgcgcgagaggctggccatgtgtaccaatcttcctgaggcccgtgtacaggtgtggtttaagaaccgcagggccaagttccgaaagaagcagcgcagcctgcagaaagagcagctccagaaacagaaggaggccgagggttcccacggagaaggcaaggtggaggccccagcctcagacacgcagctggaaacagaacagcctcctggtttgcccagtggtgatcctcctgctgaacttcaactgagcctgtcggagcagtcagccagcgagtctgccccagaagatcagctggaccgtgaagaggactcccgtgccgaggagcccaaagctgaaaagagccctggatctgagagcaaggtgccgggctgcaagaggggcagccctaaggcagattccccaggcagcctggccataacgcccgcagccccagggggcggcctccttggtccttcccactcctactcctcatccccactcagcctcttccgtctgcaggagcagttccgccagcatatggcggccaccaacaacctgatgcactactcgtcttttgaagtgggcggtcccgcacctgcggcggctgcagctgcggcggctgccgtgccctacctaggggtcaacatggccccattgagctccctacactgccagtcctattaccaatccctgtcagcagctgctgctgcccaccaggggccttcaaggactaagtggcttgcctcttttacctttaccttcagccctcctttgatgagccatctagaggaagactgtgcagccgaagcctctagcctggctctagtagtggctgctattggcaaaggcttcatgtctgttttcagtcctgcagcaacttcctctgagacgcaggacttcctagagcaccccaagttccccatggcaaatcctggggagcactatcctttcaggaggatcagttccgtgttcttcctgcagctctgtacctctggggatcaggtgatcaggttagagggcttagtcttctgctgtgccccttgcaggccttaccaggctctcaaggactcctccagccagggagcttgctgtcagaatcccatcctcctcttaacagaaacagctgtccagtggcctgcctgcgaggggcctgcagagtgtgtgacacccaccgccttcactcattacatgcacactcatggaccaaacataccccggacactgctgcactgcatgcagaactgcagacacgggctgacatattcccatctgatggagatgagcttctacgtagcagttgtgtctctagacacctcctgcttggtgctggtggagggcaacagcggctcttttatttcctctcagttcttcctgatgctctcagatgtgttcctggtcccaagccaggggacatgcatgggcagacttagtctagacctctgcctccacaacagcaactcagctacctggagcaataggagggatggttgttccttcaccccatttcagctgccctgctcccatggtgacctccaggacttcatctcccttggcattaccctggaccagcccaccttggagaggccgtatatcgtgttctccactatccccctacttccatcacagta

SEQ ID NO: 898 - protein, 762 aa, Mus musculus
MAASMPLALCGAGYYKKKLMVTLQAWGGADRLSIPEEHPGECQREVGAVRFIHSCNSWDCLLLTTFEFLLWICPQLLPQDHTLLRLLTEGMDIQTDCPCPVSGIVQAGEEAKTLSSSSLGECSLLDLGVGQADAAMQHYGVNGYSLHAMNSLSAMYNLHQQAAQQAQHAPDYRPSVHALTLAERLADIIARYGSQHRKQRRSRTAFTAQQLEALEKTFQKTHYPDVVMRERLAMCTNLPEARVQVWFKNRRAKFRKKQRSLQKEQLQKQKEAEGSHGEGKVEAPASDTQLETEQPPGLPSGDPPAELQLSLSEQSASESAPEDQLDREEDSRAEEPKAEKSPGSESKVPGCKRGSPKADSPGSLAITPAAPGGGLLGPSHSYSSSPLSLFRLQEQFRQHMAATNNLMHYSSFEVGGPAPAAAAAAAAAVPYLGVNMAPLSSLHCQSYYQSLSAAAAAHQGPSRTKWLASFTFTFSPPLMSHLEEDCAAEASSLALVVAAIGKGFMSVFSPAATSSETQDFLEHPKFPMANPGEHYPFRRISSVFFLQLCTSGDQVIRLEGLVFCCAPCRPYQALKDSSSQGACCQNPILLLTETAVQWPACEGPAECVTPTAFTHYMHTHGPNIPRTLLHCMQNCRHGLTYSHLMEMSFYVAVVSLDTSCLVLVEGNSGSFISSQFFLMLSDVFLVPSQGTCMGRLSLDLCLHNSNSATWSNRRDGCSFTPFQLPCSHGDLQDFISLGITLDQPTLERPYIVFSTIPLLPSQ

SEQ ID NO: 899 - DNA, 22062 bp, Homo sapiens
ttgcttctaaactctgttcccccttccccacctggagcttgtgacactccagagcctggtttcatcctcatatccagcgaaagacgtggatacctccccccagcccctacccccctcccccaaaaaagaaagaaagaaataatataaatgtgaaaatcacgtgtaatcccatttgctatctcccagagataacctctgttaacatttcaggttataaccttccagacttttttctatgcatatttatacatacattacaaaaatggatcgtatcatgcatactgctttgttacctatttcccccactcaacagtatattgtgaacatcagcacatacagatacacatcattgttttaaattgcggtgctgtagtccactgggaatacctgtcccctcatttgctaaactaatcctctctcgatggacagttaggttttcaattgtttgccatcacaggcagtgctgtgataaatattcgcatacacatatctctgcatacttgaagggtacgtttctagaaatggaatcattgggtcaaagacgatgtactctctaaaggcttttgatgtaaggaataaatagctcttctgccatcaaggtaggagaatgaccatctgccactcccctagataaccctgtgtaataatttttctttatatttgctaatctgatcggtaaacaatgacctttcttttcttttccctcccccttccctctctctctctgtctctttctttctgtttctttctctcccttccttccttccttccttcctttctttctttctttctttctttctttctttctttctttctttctttctttctttctcttctttctttctttccttctctctttttttctttctttctctctgttgccaaggctggagtgcagtgacatgatctcaggtcactgcaacctccaccttccgggttcaagtgattctcttgccccagcctcccgagtagctgggattacaggtgtgggtcaccacacccggctaattttttgtatttattagtagaggtggggtttcaccatgttggccaggctggtctcgaacactgaccttaagtgatcccaaagtgctgggattacaagcgtgagccacccacgcctagcctttttctttctttggttataaataaggctgagctttttgtcatgtcagttggctatttgtatttcttctttaatgagttgtttcttcatttacttagcctatcttttactaaggtgactatctttttatttatttagagatggggtcttgctatgttgcccaggctgaattcaaacttctgggctcaagtgatcccctcactttagcctcctgagtagctgggactacaggtgtgtgccaccgcacccagctttatttttttattcctaagtaagagttctttgtatatatcatggatattcccttttatttgatttgtgctatttattttttatgaattcctctatgtcatatacagtatataacagatatttttccaaatttattgtttgccttttagctttgtttatggtatattctgttatactgaggtgtaaattcttcatctcaccatgtctatcactcttttctcttagctttctgccttgaggttatggttatggtgtgtggagtgggcttctgcaagtgaatgttgttggaggaagttaatgtgtgaatgctgactctgaagtctgtaaatctagccctcagctccagacttctatatccaacagccaattcaacatatgcttacttggaagttggattcacgtgtcagtcattcttgccatgtcccccaaaaccttggtttccattctctccctcctcagatctgcttctccaactcaatgctcttcattcaggaaaagacccatcttcactcagctgttcaggatggaaacctgagttatcctttttttttttcccctcttttcctcacatcttataactaagctatcagcaatcatgctgattctaccttcaaaataccagaatctgaccattttcggcacctcctcccactctagtgaaggcagcatggtcactagcctggacttctgcagtgtcctagtggcctggtctctccacttttcttcttgcatctctgcagttttttctctgtatagcagccaaaatgagcttttaaaaacaaaccataggccaggtgtggtggttcacgcctgtaattccagcactttgggaggccaaggcaggaggactgcttgagcccaggagtttgagaccagcctggacaacatagtgagaccctatctctacaaaaaaaataaataaattatcccagcatgatggtagtcccagcacacccaggaggctgaggtgggaggactgcctgagccccagagattgaggctacggtgagtcaagattgcaccactgcacttcagcctgggagacacagcgagaccctgtctcagaaataaaaaaaacaaaacaaaacaaaaaaacccagatcatattatgttacttccctcaagaccctccaggggcttcccatcacactcgggataaaatccagctgggatttccattgggccgtgggattagtgggattacaatgggccgtggagccctctggctagcggcccctctccctctaaccttacctccttcacctgctccctccatctgtgctccagccaccctggttttcttgctgttctacacacacaagcttgtctatgcctcagggcctttgtccttgctgttacctctgcctggaaagcctttcctgagagctccacatggctgacttcaagtttctgctcaaatgtcggagagccctttcctgaccacatgttctaaaacaatctctcctttccctcttgtcattctcctcctctgccttatttttcttcagagcccatattccagtccgacagtagtacatatatttttattcattgttatacatccctctatccaggaatgtaaattccatgaagttagggactttgctatttagtaagtgggtgcttaataaatatgtgttggatgaatatgtgtaatatacaaatggatgtgagtgtaatgtttgtgtgtagatgtctctgctgcatgagtagatatctgtgagcatgtctgtgtgtggaactgtgggaaatgacattcagtttgtgtctgtgattaaggaggcttctgtgaatgccttgccaagaatgtctgcgtacgtgtatttttgcacgaaacgttcatgtgcttgcctgcaactgtgtgtgtttgtgtgtaagctgtggttgtttgattatatatagcctgtgtctgtttcagtgaggagctgagatacctgcatatgtcttccttttatcaaatggacctgccattgccccagccttcccttttcacctcccacacttgggaaataggaaacacctttgtgttttggggagactccagatgcggagtcaattccaaaaatgacatttcacactgctgcagactgggtgagggtccggatgggaccttggcagcctcttgttgaggctggagccgtctcagtaggatggatgtcttctctgatgaatggaatatttccttggaacaattggccgtgaaagaataaggctcatgtccttcgcccactttttgatggggttgtttgtttttttcttgtaaatttgtttgagttcgttgtagattctggatattagccctttgtcagatgagtaggttgcaaaaattttctcccattttgtaggttgcctgttcactctgatggtagtttcttttgctgtgcagaagctctttagtttaattagatcccatttgtcaattttggcttttgttgccattgcttttggtgttttagacatgaagtccttgcccatgcctatgtcctgaatggtaatgcctaggttttcttctagggtttttatggttttaggtctaacgtttaagtctttaatccatcttgaattgatttttgtataaggtgtaaggaagggatccagtttcagctttctacgtatggctagccagttttcccagcaccatttattaaatagggaatcctttccccatttcttgtttttctcaggtttgtcaaagatcagatagttgtagatatgcagcgttatttctgagggctctgttctgttccattgatctatatctctgttttggtaccagtaccatgctgttttggttactgtagccttgtagtatagtttgaagtcaggtagtgtgatgcctccagctttgttcttttggcttaggattgacttggcgatgtgggctcttttttggttccatatgaactttaaaatagttttttccaattctgtgaagaaagtcattggtagcttgatggggatggcattgaatctgtaaattaccttgggcagtatggccattttcacgatattgattcttcctacccatgagcatggaatgttcttccatttgtttgtatcctcttttatttccttgagcagtggtttgtagttctccttgaagaggtccttcacatcccttgtaagttgaacagacacttctcaaaagaagacatttatgcagccaaaaaacacatgaaaaaatgctcgtcatcactggccatcagagaaatgcaaatcaaaaccacaatgagataccatctcacaccagttagaatggcaatcattaaaaagtcaggaaacaacaggtgctggagaggatgtggagaaataggaacacttttacactgttggtgggactgtaaactagttcaaccattgtggaagtcagtgtggcgattcctcagggatctagaactagaaataccatttgacccagccatcccattactgggtatatacccaaaggactataaatcatgctgctataaagacacatgcacacatatgtttactgcggcattattcacaatagcaaagacttggaaccaacccaaatgtccaacaatgatagactggattaagaaaatgtggcacatatacaccatggaatactatgcagccataaaaaatgatgagttcatgtcctttgtagggacatggatgaaattggaaatcatcattctcagtaaactatcgcaagaacaaaaaaccaaacaccgcatattctcactcataggtgggaattgaacaatgagatcacatggacacaggaaggggaatatcacactctggggactgttgtggggttgggggacgggggagggatagcattgggagatatacctaatgctagatgacgagttagtgggtgtagcacaccagcatggcacatgtatacatatgtaactaacctgcacaatgtgcacatgtaccctaaaacttaaagtataataataataaaaaaaaataaaacattaacttctacttaaaaaaaaaaaaaagaaagaataagcctgcaggaatgtggagtggggcaggccctggactggctgtgtggcctcaacttgtcactgttctttctctgagcctcagtagactcaactgcaagtggggcttgtcattcttggcctgcttgcttcttggagatatggtgagaataaagggaggtaatggcggtgaatgtatgacagtcataacaacagtattcttatcagtattcttatgtttgtgcaggaccttagggtttatctcatttcttttttttatttttatttttatttttggagacagggtctcgctctgtcgcccaggctggagtgcagtggtgcaatctcggctcactgcaacctccgcctcccaggttcaagcaattatcctgcctcagcctcccaagtagctggaattacaggcatgcgccaccatgcccagctaatttttgtatttttagtagaaacgaggtttcactatgttggccaggctggtctcaaactcctgacctcaggtgatccgcctgccttggcctcccaaagtgctgggattacaggcatgagccactgtgcccagccctgggtttatctcatttcaaagcaaatgcctcagtgggcagtctagctctgatcttggctccaagtgggcctcaatggatattggttgaataagtaataagtgtgtgagtgaatcaatgaaggtaaaaatgagtaagtgcctgagtaattgaacgaagagatgattgcataaagcagcaaatgaatttgtaaatcacaatgactaacacttttgagcacatactatgatccagtcctttgtaaaggcttctcttaatccttgcagcaaccctatgagataggtactatcatgaaccccatgttgcagatagagaaactatgggtcagataagttaaagccacaaagctcctgagtggtggacttgaggtttcagcctgccctgggcagtctgactctagagcccagagccctaaacccacactggccctgccgagtgaatcgatgaatgagtgggtgaatgaaggagtgaatgcaggaacccccacacggtaagccacgggcaagacaggctcccttccgatggagggagcttctgacccatcagaaggtgggcatccagggtctggactgggggtgggtctccctgagggcagagtctgataggcctgcctcatggcccctctcccttttccgtctgtaggcggatgccgccatgcagcactacggggtgaacggctactcactgcacgccatgaactcactcagcgccatgtacaacctgcaccagcaggcagcccagcaggcccagcatgcccccgactaccggccttcagtgcatgcgcttacattggctgagcgcctggctggtaagggccctggggatgggaccatggggacaggactgtgggggttgggggagaaggctctggaaggcaaagaggagagggagcactggccaagcttgttctagggggctcaaaaagactcaggtcacttagcaacacagagagatgtcaattcaaaactatgcatgtatatccagagtgccttttgtttgccagcactgtccagggcgctggagctgccctatgctttcaaattctcaaaacaagcctgtgagggaggcattcattagccctatctcacagatgaagaaatgaggtaggagggtaagggactagtccagagtattatggctgggaagtagctggaagaggctggaatgcccaggcaaggagagttcaggcacagggaattgtaaataacagcttctatgttctgacaccaactgtgagttaggcactgtgggagtctctctctttctgtgtgcctcaaatcatccaatccccatgtggagaggttattatttccattttatggacaaggaaacggaggctcagagaggctaaatctgggccaagtggggttggaacgtaacatggctaaaaatatgagctttggagtcctagacttgaaatcagcacgggctttcccactcagctctcttctctgagcctcagtttctccttttataaaaaggagacaatggccatgcccatcccctagggtggttgggaggtgatttgtgatgacatatgcaaagcattcagaagagcctggtaggtgctcagaggtcattattacccaaagcccaaggtaagtacccatatatgcctatgagggaccggcagtctggtgccccacacctggttctactgactgttgccctgccctgccagcctctcggtgggtgagaaaaggattcagtggcatggatggggagtttgatgtcctgggaggtggtgccacccaccccatcctgtcccaggtccagccttgagcagctggtaaacccacatgggctcagccctgtgccaggcaggcctcagaaaacttcagggaactcctagggagaacaggtgcccatgacccatgagagggcacaacaggagggtatccaaggtcaaatgctggggcagctcagagcagcaggatcagctggggtagtcaggaagagctttctgaaatccacaggggcaggaaccaggcctcaaaaaggccaacatgagcaaaggcacagaaatgggatgggatctccacctgggtagcagcactggcctggcagggagggcatggccagtctcactcctttagaccctgccaggcctctgggcagaactcagtggataaaggttctctggaccagtgtggaggcattagtttctagtgtggggatgttggatacagtcctatgcacaacctggtggtgacatcagctcctgacagtattccaggacccaaggaccagagcacagagaggagtcagggacagggggctcatgtccgctggtgggggcagaggaactggggtgttcagcccacccccaactctctaattcttaggaaggaaggacatgaactccaagtgagcctttgtatggaggccttgccttccagcagaggctctgccggcggtttagagagcctggcttccctgtgacacctacacgccccccaccccccaccacccaccacccctgcagtccctggagccagcagtaggatgctgagctgttgctccttccccaaccagagtggggctgacagagcggtccccactccttcccctgccccaggatgactcagctcagggctgagtcaggcctaggattaaggtcagtctgtgaggggttcaggactctctttttaaactgaagaagaagtatctcaaagtctggggcttcctggatacccagttgcctcttcctattctttttttttttgcggaggggggatggagttttgctcttgttgcccaggctggagtgcaatggtgccatcttggctcactgcaacctccgcctcctgggttcaagcggttctcctgcctcagcctcctgagtagctgggattacaggggcccaccaccacgctcagctaattttttgtatttttagtagtgacagtgtttcataatgttggccaggctggtctcgaactcctgacctcaggtaatccacccgcccaaagtgctgggattacaggcgtgagccactgtgccgggcctcctcttcctatttagggtgctgtggatgacttcccattccctggagggcgggggaaggactctggcacccctttgcagaggctgagatgactcaagttcccttcagcacaaacagggcaggatccacttatgacatgatgggaggcagtgaggagagcggttactgtctatccttcaggggctagtcaagtgaaagggctgaaggctataccccaggatggaggctagacctcggccctaggtagacacctatcctgggtggttatcatgttaccagacatgtggacaggactgtggaatcaatggtccatagtcctgtctcccctacaaacccacagtggttggaaccaggtctctttgtccttctgttcttggggaggcagccacaagggtcaagactgagtgcaacaagccttacctgagacgtgagccctgccacccccaccctccccgctccactcttaccccttagccaggctctctgttcaggaaacagaagagtaggagcctgaggccctgccatcagagactctaggccagctgggatgagggggtttacatgcagaggacagagaatcaagtgctggtgaattctgtctgcctagtcagtcctcccttgactagaccttgagatgggtaccagcccagcctggcttctcatgggcagggaccagtactctgatgctaaagaagtcttagtattcagaatctaagggctatagggtcttagaactcctgtgatatggacttacagattattagcatcatggagtctcaaagtatactcatagtatccatcttagggtaatacccacctacccaatcccaatgccaaataatgaagacccccctcaatcatatgcctgacagccatttttggagttgagttagacctctgtggtcctgatagtgcataatggggtggagagaccttgaaagcccacagccatatggagaggggatggctgatttctaagggtaagggaccagggccagctctggcagcagcctgggtgtccacagtgggtcagagcaggataagattcaaagctatttcccataattaaatgggccccctctccttgccctccaacggctgtacatttcaagacatcatcttggaggcccgttatggttcccagcaccgcaaacaacgtcgcagccgcacagcgttcacggctcagcagctcgaggccctggaaaagaccttccagaagactcactacccagatgtggtgatgcgtgagaggctggccatgtgcaccaacctgcctgaggcccgggtgcaggtagggcccaactctcctaactaggccttgcagacaaacaccagcccatcagtctgcccgcttgtccaggagccagcatgtcatccctgtgccaaggtgcaactgatctctccatcaaagccttcagtgataggaggggagtttgggaagggacagagggtgtgcattccctagaggggtggggggatgttatcacgtacatcctctcccagagcaccctgctccacaccaaccccacttctttcttgcccacctcggactgctcctttcccgtccccaggtgtggttcaagaaccgccgggccaagttccggaagaagcagcgtagcctgcagaaggaacagctccagaagcagaaggaggctgagggctcccatggggaaggcaaggccgaggcccccactccagatacccagctggacactgagcagcccccacgtctgcctggcagcgacccccctgctgagcttcacctgagtctgtctgagcagtcagccagtgagtcagcccccgaggatcagccggaccgtgaggaggaccccagggcaggggctgaggaccccaaagctgagaagagccctggggctgacagcaaggggctgggctgcaagaggggcagccccaaggcaggtgaggtctgaggggtaccatgggagggctggggtctgggggccctgagcgtgtgaagcaagtcagaggcgagtaatcaactgcccctcaggggcatggcgcatcagaaaggactgaccacagcaggcctgggccaggttttcaccctttagttgcagagccgtgggaaggtccagggggtcctgagggacgggctgggtagcaggggtgggatactgcgggagctcagggcaaaaattatttatcaaccatttggaagtattccaatattttaacaaccagttggatgtcccagtgcatactgggcgaatactgtattagtaccagagattcccacgtgcagcagagactccgagcacatttctgaaggaacagagctctggcatgaggcatatctcagatacaaaccctaagcccagcagggaggggacaggggctgtgagctgaaggttggagtgaaggaatgggagctctgggcagggtgggggagggggaagtttacagcccttgaaaagaaaaagagacagacgtgggggccttggcagggtccctggagctttcccaagaagcctgggtccctttctcctaggattctgagccttgcttcaggggatgctctggctgagatgggatggatgtggtttcagccgaagcctgtcttgtctatagtgccaaggaggtgagaaggctgagtgcacctctcctggcagaccaatgcccttgtcctgagggctttgttcttgggttctctgcttgcagattccccaggcagcctgaccatcactcctgtggccccagggggtggcctcctgggcccctcccactcctattcctcgtccccgctgagcctcttccgtctgcaggagcaattccgccagcacatggcggccaccaacaacctggtgcactactcgtccttcgaagtagggggtccggcccctgctgctgcagcggcggctgctgctgtgccctacctgggcgtcaacatggccccgctgggctcactgcactgccagtcctactaccagtccctgtcagcagccgctgctgcccaccagggtgtgtgggggtctcctctgctgcctgcacccccagcaggcctggctcctgcatcagctaccctgaacagtaaaaccacaagcatcgagaacctgcggctccgggccaagcagcacgcggcctccctgggactcgatacgctgcccaactgactgtctggcttccaacccagccaggggtcttaggtgtcccctcctagccctgtggttatccctaggtggctctcgaggagttaactccatgagcccagggatcctagggcctggggtcctgttccctgctccgcttccccataccccagcccgaggtgaagcccacacctacacaccctctgcatggccctgcctggaccccatggaggccgaatagggaggaggtgagaggctggggtgccccaagcttccctcggagaagtgagaggctctccctggctagatcctcatctcaatagcacctcctcccttttctccctatccttctgccccctagtaagtctacgtgtggaatgtgagatataaatataaatatataaagctatattttcaggctcctgcctgccccaggccccctgccccactcccatctcttcttccctgccacccctccctgcagcctccgcggctcactccagccatcccttctgtttctccttctctctccttccttcttcccttgatctccctcttcctgtctctgtcctggtccctgcccccgtctcggcccagcctctgtattctccacccttgatctttctccttgtctctcccgctgcccctggtttcttcctttggtgttggctgtgttggtatcatcagttcttgagctatattttgtttggggttgtggctggttttggttttagtaattttgcgacttcccgttgctctccttctattcccttccttctgccctgcctgcctccctgcacctgcggcctctctaggaagctgttcctttctatgcccaatagaagcaacaaggccctagctggagactctggggatctggagctgcaggcaggaggtggcactggctcccactcccacccctgcccaggctggcatctagaaggcgtcatgaattactttctcttctctcttctcaattttgaggtcctcattcccaagattgaggaggcagtagttaatctgggaaggcagtagaatggccagcattcctgcctgtaagtcttcccaagacagaggcctggtgacacagttcagccaggactgaccacagggctctagagctctctttggtgagacttccctggatggagagcagcagcaggggaagaggtgctctcagagacagcagggctggtgctcttctcccacaagctgagcctccacgttcagcagatactgtccaaggcaggggtacggctgaccaggaatgaaggttgaactctgctcctgagcacggtgcgtgcaaagcatatagcagcacataggctcaggcttctgtaggcttcctgtcccagagccaattatggaagtaagggcttccctccagctagtcactggaatggaaaagtgtgttcctgttcatagccaggaaacccagctcagcaaactccctttcaaagctgtgtgaccggctgggcatggtggctcacacctgtaatcccagcactttgggaggccaaggcaggcaatcacctgaggtcaggagttcaagaccagcctggctaacatgtgaaactaataataatacaaaaattagctgggcgtggtggcacatgcctgtaatcccagctacttgggaggctgagttgggaggattgctgcaatctgggaggtggaagttgcagtgagccgagatcatgccactgcactccagcctgggcgacggagtgagactccatctcaaaaaaaaaaaaaataaaaataaaagctgtgtgaccttgggcaagcctgtagcctctctgggtctgtttccctgtctgggttagatggcctgtaaggtcctagccagctctacattctgcatttgctcgcaaccttgtaacacagaagtttttagttaaattgacaacagaaggttctcaaaagcacaatatatgaagtaggaaattactattgcctttctgtggagcaaggggtgttgtacacacaagcctcactgtagacactgcctcagtttccccataggcataatgggtcccttctagttcaggcaatctggatttgatcttgagttccagtgccagcctctggagtcactccattttcataccttttcatgatctcaggggctctgggcagtgggaggtgatggcttggacagattcttggtcatgctccccaactcttggtggctcaccactgaacactccaaaccctgcttaaagaagttgatctatctgaaagccagggtaaagattgctaaggcttgtctcctctcccagtgggaagagagaggttctgttggtgtcctggttgaattgctttgcagagaagtcaatgcccatcacccttgatgggggtcagcctaggctggggcagatggagaaggctttggacaggaaaaaagtgagcaggatggtagtctaggccaggagaagtgtttgaacaaagcagcagagatgagactcagtagaccatgggaagggggtggctggcttcacgagaggtggggctaaggggcctggaatccaggctaaagaccacacctacatgtggcaagcaccaagacaggcatttgagggtttccaaatcctcaggtctcttgctggggtctggaatttggaaggggaatccaccagccatgggggcatcagaggagagacttaggcagcgctgtgggaggttggcagattccaggagtgacagaggaggtttttggtttgggagggattttgtggccaatagcccatcaactgtcctctgggattagccccaggaagttctgtttctaaaacaaaaaataatcatctggataggtatgggaagcttcctagctgcttttaggctgaagctttttgtcagttcctgggtacaagtgactgtcactaggccttggaatccaacagccttagatatcactacctcctccaggaagcctcccctgaactcctaaggggcaatgttctgtcatggctggaggcaggcccaccttaggagcagcccagcttccctcagatgtttgttaacacttgtcccattcaattgacccaaatctgccagagaaggcagggaaggtacatgtgatccctgccctcggagggctctcaagtttagggcaccagccttgggtactgaaagcagctggagagcaagaggagaggacacctgtgtctcctccaagcacactggtaagcggcaccgtgcatctcctctgagcacgcttgtaagcagcaccgcgcttcccttcttgtgggcagagggtacaggcccaccacacctgatgctggagcccctcccaggcctgctgggccaacctgggcctgaaagccagaggctcaagctctgactgtcccttccaggaatgcctcatgcctggcctctccctgctgtctgcgtctccatttctctgtttcctcactccctcagagcatggtccaggggcccggatcccaaccccaactccaaggctggtgggctctacagactgctttccaaaccagctgttttgtgaccatttgtgcttagaggtcgtgccagcccatggcaaagacactgtgtagtgtatttatttattctgttagtggaaaaaaacaagacttaattcacccctgcctgtcccctcgcctgccccctgtgtagtgctgcatgacactctgtgtatctgtccttctgtcagtctcattccctgtgatgttgtgacctgttctttgtcttacttggcgaataaaagagaacccagcagcccagacctcagtccatgttcattcccagagatgcccgcagtggcctgagcaggcagtgtctccaggtctgttcactgcccctctgatgccatggccagtggggagggaggcggacctactgcactattggccattgtcacactgactgtgtagctctctctgtggcccttactaatctgcagccgggatgccactctggaatggctgcaggggagcagataatgggagacagttccatcttctctaggctgtttggacctcacccaaacacaagtggcagagtagcctgggacatgggacgcctgagacaagcaatgcctgggagtattcagtgtagcttgggagacggatgggtctgcaggacagagagaggcaggggactctgtggaaaactgcaagtaagccagggccaaaggggagtggcaagaagagacatttggatctacagccagagctattttccagtggaaagggaggccttcagaggctgtgagctctgtcctcagaggtgagcaagcagaggatgaaggagggctttctgccatggtgcgctggggtgtgtctgtgttattataagtctatctgcaggtctgagaacctgtgctatgaattcctaagtgtctgcttgcatctgtgtgtgtacgagcacattcacgatgagcaggagagacagcgcgagatagacggcaagaccgtacatataggcaataagtgcagaaaaaatgcacagccaggaagttcttgctgtgaaaccctggtccctccagctgcatttcaagaaaaagaagacaagagatctctgctcagtcctggctgctttggctccaccttcttccccggtgctccagagtgccggcgcagggccaagagccagaagaggtggtgcatgcacctggctgaggtttaggggaggtgacagtctcctctgtctgcggatttcctggtaggagaacccagcagacctgaatgtatgcagggagctgtctgctaggcttcccaggggcgggccctgacctccccacttcccaggtccaccccaggagacgcattcctctctccccagcgggctgaggattagggcggggagcgtctccctttcaccttgtcccctgcctccctgggaggggctgagagatcaaatatctgcctcaaatctcccactgctccctcccctggcctgagccattgactgcctcctacgtacttcagccccaagggacacaccttccctggcataaagggtaccctggtaacactgcagttcaaatcactcatgcactcagcatacacagagcacctgctgtatgcctatgcctgtgctgggagctggctacatagaaacaagtaaggaaaacactacaacacagggtgatatggtgttcaaaaaatggagaccttgggatgggcacagtggctcacgcctgtaatcccagcattttgggaggccaaggtgggcagatcacctgaggtcaggagttcgagaccagcctggccaacatggcaaaaccctgtctttactaaaaataacaaatattagccaggtgtggtggcgtgtgcctgtaatcccagctattcagctactcgggaggctgaggcacaagaactgcttgaacctgggaggcggaggttgcaatgagccacggcactactgcactccagcctgggcgacagagcgagcctctgtctcaaaacaaaaaacaaaaaacaaacaaaaaaaaggatacctgtgggagcacagaagaggacccctagctcagtctagggagatcagaaaggccccttgggagggagacttttgacctgagtctcatgggtccagtgttcaccaggaagtcaaagagaagggtgccctgggagaggcatagctcatagaaagctgcaggattgagccagcttgccaaagccctgagccctgaaagaacaagggacttgtctgggtggggcttgaggatggtgggggtggtgccagccagtgaggatgaggagggaaacaaggaccttggactgaagcccaagggccaagggtgtgggaggcactggaagctattcccagtgagggagtggggtgatctatgcgtattttagtaacccccactttcgctgcatggtggctcatgagaaggaggtgggggcaggagatcagagaggaggccagtatctgtcacgtcctggtgagaggagggtggcatccatctggactgggggagggagtgcagagcaggggtctgattgatgagagatttcggaaggaaaattgttgtggtgattttaagcaggatggggagggtcaagggtactttcaagtctctggccaggcaatagggtagatggagacccctactctgttggagtggagtgagtgtccgaaaatgatcctgagctcagggtagtcttgtttgctgcatttgaggagacttctatttattcaagggaagatgtagggtctgtctctgctgctgacacagactttctctgtgcctggcaccttacacgtaagaagccacttggctgggcatggtggcccactcctgtaatcccagcactttgggaggccgaggcgggcatatcatgaggtcaggagttcaagaccagcctggccaatagggtgaaaccctgactctactaaaaatacaaaagttagccgggcgtggtggtaggcacctgtattcacagctactcaggaggctgaggcagaagaattgcttgaacccgggaggcagagattgcagtgagctgagattgcagcactgcactccagcctgggcaacagagtgagactctgtctcaaaaaataattaataataataataataaataaaagaagtcacttaatccttacacaactctatgaggtaggtactattactatcctcatttacagatgggaaaactgaggtacagagtggttaaataacttgctgaggggccacatagctagtcatgggccaaccaagggatgaacctggctggcctcagaatccatgctcttagccttgatggttgtcacagggagatggtgaatgaagccacgttgctaaatgagattacagagagagaagcagaggatgggacctcagggaaacgctgaccacaaagagaagaagaagctactggtggagccaggatgagctaagcctggcttgctgtttactgagggcaaataactatccctctctggtctgcagtttcctattctgttgaataggaatctttaaccaggtccagcctgcttcctgggtgactcagaggaggtaaaaaggagaaggcactggggaggctgagaagctgagcagttctaggcccagcgtgccgttggtgctcagatagcccatggtgggggaaatgggaaaggtagggggctccccgaagcttctctccaaattccccacgttctctctttcttttttttgagatggagttttgctcttgttgcccaggctggagtgcaatggtgcggtcttggctcactgcaacctccacctcccgggttcaagggattctcctgcctcagcctccccagttgctgggactacaggcgctgaccaccactcctggctaattttttgtatttttagtagagacgggtttcaccatgttggccaggctggtctcagactcttgacctcaggtgatccacctgcctttgcttcccaaagtgctgggattacaggcgtgagccaccgcctggctgagccatggcgcccggtagttcccccttctcttaggccttggccaatgttcttgcagctcaggggtctggttccttaggggccctcagggaaggggcccctgctgagagggtctggggaatggacccctttagggctgggcacttccctcatctctttcccacagagctgctctgggctggagccctccacccccatcactcattctcctttagcttctgggaaagccgattaggaggtggccttctacccgcccccctgacaagtgtgtctgaacttccaacaaaggccctcagagggttgcagagggagggctcagcactgggaacctgacaccactggccagggatcaccccagcagcctaggaggcagctctgtggggctgcccaccccacggcaggcaggaatgtcgctctgagaggggacctggtcccacaaaggcctgggggctgggctggggcaggctggagaggtcttcacctgggaggcctcacaataaggaagacagcaagggccagcacccaggaaggcacgtgggaataggcatacacgcccccacacactgacagcctctcacacacattccccatacattcacagcacacacgcacacacgcatcctctcacacccctgggacatgttgacttctgcactggaccacacaatcccagggtgtctgtctccctgtctctcatgcctgtgtacacagccccactgcaaaccggcagacacacagccacgctctttcgcctgatgctccacacacccgctccacccccagacatgcattcttcccggcttgctcacactccagacagcccctgaatgctcagtggcaccagctcccctgtacagacagcctctcgagccaaactgctggcctggtgcccacagagacttggtggcggctgccctgtgattgtggaagatgccacccaaatgcccacataagagtcagacactggtcccagctgccatgtgaacacccatgtgcaccaacccacacatccaccccaaggggctgccttgagcccacctcttcacagcatgctccctcctgcagcagcctcatgggcgtgtgacccatgcagtcacacagggccctgggctcagagggcccgcaatgttctgatgtcaccatcttgaaatctttacattttaagcaaggggcgctgcattttcattttgccctggaccccataaaatatatagctggtctcactcccaccccatttctatttatttatgtatttatttgagacagagttttgcatttgttgcccaggctggaatgaaatggtgtgatcttagctcactgcaacctctgcctcctaggttcaagcaattctcctgcctcagcctcccaagcagctgggattacaggcgcctgccaccacacctggctaatttttttgtatttttagtagagacagggggtttcactatgttggccaggctggtctcgaactcctgacctcaggtgatccgcctgcctcagcctccccaagtgctgggattacaggtgtaagccacagtgcccagcccaccccatctctttcagctaagtcactggcccttctgtggcttcagaaacccaaggcctccagaaagccctctgcttctcccacctgcccaagggccaccacttcctcttccagccacggtttccttctccaccccattcctcatcaggcaactgagtgtgaggggtggagggaactaccaagagcttcctatacacacctcctcctagtgtcaccttgggactcagtattctccttggtaaagtggggcgaatgataatgcctacttcagggttctttgttaggaataaaagataacatctgtaaaacacttagcacaattttggcatttagtaaatgctcaatacttgcttgtttttttttttttaaatttgtttttacttttattatttgagatgaggtctcactgttatgcccaagctggtctctagctcctgagctcaagtgatccacccaccttggcctcccaaagtgctgggattacaggcatgagccacgacgcccggccaatacttgcttgttattattgcacttattacattatgataagtgccactaaacaaaagtagactcagttcctggccctatatatagtctagtggataaaatggagattactcaaataatcacacatatatccacgtaaaggagcaggggtgaatgagaagtgcacacgtctctgacctcgaagggcttacggctaacaggaggggcaatctgaggctagattcaggatcaatctagggcaagacacagctcgattagaggtcagagttggagctcagaatgggccatggcaggactcagtttggggcagggccggctcagtctgtgactggtgccaagtcagtcacagtttcatttctagcactgactcactgtggactatttaataagctgctaggcttctgggaacctctgtttcatcatctgtaaaatggggaggtctctgtctacccccaggcttgtgggagttgagtgcggtaataatggaagtgaaggattaagcttctgttgccaccactaatgactccaagcccggcccc

SEQ ID NO: 900 - skipped

SEQ ID NO: 901 - protein, 306 aa, Homo sapiens
MGPLSLPSNGCTFQDIIARYGSQHRKQRRSRTAFTAQQLEALEKTFQKTHYPDVVMRERLAMCTNLPEARVQVWFKNRRAKFRKKQRSLQKEQLQKQKEAEGSHGEGKAEAPTPDTQLDTEQPPRLPGSDPPAELHLSLSEQSASESAPEDQPDREEDPRAGAEDPKAEKSPGADSKGLGCKRGSPKAGGGLLGPSHSYSSSPLSLFRLQEQFRQHMAATNNLVHYSSFEVGGPAPAAAAAAAAVPYLGVNMAPLGSLHCQSYYQSLSAAAAAHQATLNSKTTSIENLRLRAKQHAASLGLDTLPN
